(19) United States
(12) Patent Application Publication
(10) Pub. No.: US 2025/0287945 A1
(43) Pub. Date: Sep. 18, 2025

(54) COMPOSITIONS FOR FUNGAL CONTROL AND RELATED METHODS

(71) Applicant: Flagship Pioneering Innovations VII, LLC, Cambridge, MA (US)

(72) Inventors: Hope Hsiao-Wang DANISON, Somerville, MA (US); David Barry KOLESKY, Arlington, MA (US); Sindhu Manubhai KRISHNANKUTTY, Stow, MA (US); Antonio Diego MARTINEZ, Beverly, MA (US); Yajie NIU, Lexington, MA (US); Michka Gabrielle SHARPE, Cambridge, MA (US)

(73) Assignee: Flagship Pioneering Innovations VII, LLC, Cambridge, MA (US)

(21) Appl. No.: 18/291,201

(22) PCT Filed: Jul. 22, 2022
(86) PCT No.: PCT/US2022/074082

§ 371 Date: Jan. 22, 2024

Related U.S. Application Data
(60) Provisional application No. 63/225,356, filed on Jul. 23, 2021.

(51) Int. Cl. A01N 37/46; A01P 3/00; A61K 36/062; A61K 36/07; A61K 38/16; A61P 31/10

(52) U.S. Cl. CPC A01N 37/46; A01P 3/00; A61K 36/062; A61K 36/07; A61K 38/16; A61P 31/10

(57) ABSTRACT

The disclosure provides conidial germination-inhibiting (CGI) factors, CGI factor precursors, CGI factor fragments, and CGI factor motifs and compositions including the CGI factors, CGI factor precursors, CGI factor fragments, and CGI factor motifs. The disclosure also provides recombinant DNA constructs and vectors encoding the CGI factors, CGI factor precursors, CGI factor fragments, and CGI factor motifs, and transgenic organisms including recombinant DNA constructs or vectors encoding the CGI factors, CGI factor precursors, CGI factor fragments, and CGI factor motifs. In addition, the disclosure provides methods of controlling or inhibiting fungal growth and infection, as well as methods of treating a fungal disease using the CGI factors, CGI factor precursors, CGI factor fragments, and CGI factor motifs.

### CROSS-REFERENCE TO RELATED APPLICATION

[0001] This application is a national stage application under 35 U.S.C. § 371 of International Application No. PCT/US2022/074082, filed internationally on Jul. 22, 2022, which claims the benefit of U.S. Provisional Application No. 63/225,356, filed Jul. 23, 2021, the disclosures of which are hereby incorporated by reference in their entirety.

### REFERENCE TO AN ELECTRONIC SEQUENCE LISTING

[0002] The content of the electronic sequence listing (237212000100SUBSEQLIST.xml; Size: 5,861,171 bytes; and Date of Creation: May 7, 2024) is herein incorporated by reference in its entirety.

### FIELD OF THE DISCLOSURE

[0003] The present disclosure relates to antifungal or fungicidal agents, compositions and organisms comprising the antifungal or fungicidal agents, and methods of inhibiting or controlling fungi, such as fungal pathogens, using antifungal or fungicidal agents.

### BACKGROUND OF THE DISCLOSURE

[0004] The fungal kingdom encompasses a diverse group of organisms, some of which can act as pathogens for a variety of hosts. Pathogenic fungi can have detrimental effects on both human and animal health, either by direct infection, or by indirect effects from a secreted toxin. Food rot and crop loss due to uncontrolled fungal pathogens of plants or plant products can also lead to significant agricultural and economic losses. Thus, a need exists for agents capable of controlling or inhibiting growth of fungal pathogens, as well as for compositions comprising the agents that can be used to control or inhibit fungal growth and treat fungal infections of biological systems.

### BRIEF SUMMARY OF THE DISCLOSURE

[0005] In one aspect of the disclosure, provided herein are methods of decreasing growth or reproduction of a fungus, comprising providing a fungus with an antifungal composition that comprises an effective amount of at least one conidial germination-inhibiting (CGI) factor, CGI factor precursor, CGI factor fragment, or CGI factor motif, wherein the CGI factor comprises an amino acid sequence that has at least 80% sequence identity with a sequence selected from the group consisting of SEQ ID NO: 961-1920, SEQ ID NO: 1957-2189, SEQ ID NO: 2194-2210, SEQ ID NO: 2215-2243, SEQ ID NO: 2457-3361, and SEQ ID NO: 5707-5731, or wherein the CGI factor motif comprises at least one of SEQ ID NO: 1921-1956, and wherein the amino acid sequence of the CGI factor is not that of an alpha pheromone natively expressed by the fungus, or wherein the nucleotide sequence encoding the at least one CGI factor, CGI factor precursor, CGI factor fragment, or CGI factor motif does not occur in the genome of the fungus; and optionally, an agriculturally or pharmaceutically acceptable carrier; whereby the growth or reproduction of the fungus is decreased, relative to a control fungus not provided with the antifungal composition.

[0006] In another aspect of the disclosure, provided herein are recombinant DNA constructs comprising a heterologous promoter operably linked to a nucleic acid molecule comprising a nucleotide sequence that encodes a conidial germination-inhibiting (CGI) factor, a CGI factor precursor, or a CGI factor fragment, wherein the nucleotide sequence (a) encodes at least one CGI factor comprising an amino acid sequence that has at least 80% sequence identity with at least one of SEQ ID NO: 961-1920, SEQ ID NO: 1957-2189, SEQ ID NO: 2194-2210, SEQ ID NO: 2215-2243, SEQ ID NO: 2457-3361, or SEQ ID NO: 5707-5731, at least one CGI factor precursor, or at least one CGI factor fragment, or (b) encodes at least one CGI factor motif that comprises at least one of SEQ ID NO: 1921-1956; and wherein the nucleotide sequence optionally has codons optimized for heterologous expression. Related embodiments include cells or organisms, for example, a transgenic plant or plant part (e.g., rootstock or scion), in which such a recombinant DNA construct is heterologously expressed.

[0007] In another aspect of the disclosure, provided herein are methods of preventing or reducing disease caused by a fungal pathogen of a plant, comprising providing to a plant an antifungal composition that comprises an effective amount of at least one conidial germination-inhibiting (CGI) factor, CGI factor precursor, CGI factor fragment, or CGI factor motif, wherein the CGI factor comprises an amino acid sequence that has at least 80% sequence identity with a sequence selected from the group consisting of SEQ ID NO: 961-1920, SEQ ID NO: 1957-2189, SEQ ID NO: 2194-2210, SEQ ID NO: 2215-2243, SEQ ID NO: 2457-3361, and SEQ ID NO: 5707-5731, or wherein the CGI factor motif comprises at least one of SEQ ID NO: 1921-1956, and wherein the amino acid sequence of the CGI factor is not that of an alpha pheromone natively expressed by the fungal pathogen, or wherein the nucleotide sequence encoding the at least one CGI factor, CGI factor precursor, CGI factor fragment, or CGI factor motif does not occur in the genome of the fungal pathogen; and optionally, an agriculturally acceptable carrier; whereby disease caused by the fungal pathogen is prevented or decreased in the plant, relative to a control plant not provided with the antifungal composition.

[0008] Other aspects of the disclosure are related to methods of preventing or treating fungal diseases in organisms such as plants and animals, such as non-human animals; antifungal compositions formulated for use in agriculture or as therapeutics; methods of preventing or treating fungal infection or growth on a surface, including non-living surfaces; and compositions, such as a substrate or matrix, having antifungal properties, e.g., resistance to fungal contamination or growth.

### BRIEF DESCRIPTION OF THE FIGURES

[0009] FIGS. 1A-1B depict the experimental setup for a conidial germination inhibition assay. FIG. 1A depicts bright-field images showing the effect of control treatments on conidia germination at 40× (top row) and 400× (bottom row) magnification. Untreated conidia (left panels) and conidia treated with 50% (w/v) ethanol (right panels) were used as negative control conditions, and 100 μM fenpiclonil (middle panels) was used as the positive control condition. Asterisks in the 400× images highlight germinating conidia. FIG. 1B shows an exemplary 96-well plate layout for a conidial germination-inhibiting assay. As shown (from left to right): Un, untreated; eth, 50% ethanol; fen, fenpiclocil; 6, peptide106; 7, peptide107; 12, peptide112; 13, peptide113; 14, peptide114; and 15, peptide115.

[0010] FIGS. 2A-2E show results of experiments testing Fusarium and Botrytis conidial germination inhibition by candidate CGI factors. FIG. 2A depicts the resazurin fluorescence for Fusarium conidia (top panel) or Botrytis conidia (bottom panel) incubated with a concentration gradient of candidate CGI factors or controls (labeled on left). FIG. 2B shows the resazurin fluorescence quantification for Fusarium conidia incubated with 10 μM, 100 μM, 375 μM and 1 mM candidate CGI factors or controls (labeled on x-axis). FIG. 2C shows the resazurin fluorescence for Botrytis conidia incubated with 10 μM, 100 μM, 375 μM and 1 mM candidate CGI factors or controls (labeled on x-axis). FIG. 2D shows the resazurin fluorescence for Fusarium conidia incubated with 100 μM or 375 μM candidate CGI factors or controls (labeled on x-axis). FIG. 2E shows resazurin fluorescence for Botrytis conidia incubated with 100 μM or 375 μM candidate CGI factors or controls (labeled on x-axis). A pipetting error occurred during processing of the 375 μM untreated and 50% ethanol conditions shown in FIGS. 2C and 2E. In FIGS. 2A-2E, Pep106, peptide106; Pep107, peptide107; Pep112, peptide112; Pep113, peptide113; Pep114, peptide114; Untreated and 50% EtOH treated were used as negative control conditions; and Fenpiclonil was used as the positive control condition.

[0011] FIG. 3 shows the resazurin fluorescence quantification for Fusarium and Botrytis conidia incubated with 100 μM of selected candidate CGI factors and controls. Three replicates of each fungal species were evaluated for each condition. As shown: Fus, Fusarium; Bo, Botrytis; D and E, empty wells; and Fenp, fenpiclonil. In FIG. 3, Pep106, peptide106; Pep107, peptide107; Pep112, peptide112; Pep113, peptide113; Pep114, peptide114; and Pep115, peptide115; Untreated and 50% EtOH treated were used as negative control conditions; and 100 μM Fenpiclonil was used as the positive control condition.

[0012] FIG. 4 shows the resazurin fluorescence quantification for Fusarium and Botrytis conidia incubated with 100 μM of selected candidate CGI factors. Four replicates of each fungal species were evaluated for each condition. As shown: Fus, Fusarium; Bo, Botrytis; D and E, empty wells; and Fenp, fenpiclonil. In FIG. 4, Pep106, peptide106; Pep107, peptide107; Pep112, peptide112; Pep113, peptide113; Pep114, peptide114; and Pep115, peptide115; Untreated and 50% EtOH treated were used as negative control conditions; and 100 μM Fenpiclonil was used as the positive control condition.

[0013] FIG. 5 shows the CGI factor amino acid motif (SEQ ID NO: 1921). The height of letters in the motif indicates the degree of conservation, with taller letters being more conserved. The Y axis is the stack height, which is an expression of the relative entropy of the position; the height of a letter indicates the estimated probability or degree of conservation, with taller letters being more conserved. For this motif, the predicted probability of a given amino acid occurring at the specific position listed is as follows. Position 1, W: 1.000. Position 2, T: 0.011, E: 0.014, K: 0.025, Q: 0.027, S: 0.040, R: 0.043, G: 0.098, and H: 0.742. Position 3, W: 1.000. Position 4, G: 0.047, I: 0.087, V: 0.103, and L: 0.763. Position 5, A: 0.022, T: 0.040, K: 0.066, E: 0.067, N: 0.071, S: 0.128, R: 0.283, and Q: 0.323. Position 6, I: 0.051, F: 0.171, and L: 0.778. Position 7, E: 0.013, A: 0.015, Y: 0.016, Q: 0.020, M: 0.036, F: 0.041, S: 0.043, G: 0.068, D: 0.107, R: 0.301, and K: 0.328. Position 8, N: 0.010, T: 0.015, L: 0.020, A: 0.021, Y: 0.025, I: 0.025, W: 0.031, V: 0.039, M: 0.045, K: 0.089, R: 0.110, and P: 0.556. Position 9, G: 1.000. Position 10, A: 0.034, E: 0.182, and Q: 0.784. Position 11, P: 1.000. Position 12, F: 0.028, L: 0.093, I: 0.182, and M: 0.697. Position 13, Y: 1.000. The top X axis indicates the position k of the amino acid in the sequence. The first row, lower X axis, is the insert probability, i.e., the probability of observing one or more letters inserted between the letter corresponding to position k and the letter corresponding to position (k+1). The second row, lower X axis, is the insert length, i.e., the expected length of an insertion (if present) following position k. The third row, lower X axis, is the occupancy, occ(k), i.e., the probability of observing a letter at position k; the probability of observing a gap character or deletion relative to the model is [1−occ(k)]. This motif is characterized by having instability only at the last 3 amino acid residues (positions 11, 12, and/or 13), for example, where the CGI factor polypeptide lacks the position 13 Y residue.

[0014] FIGS. 6A-6C show Fusarium viability colorimetric assay (using resazurin) results from three experiments. FIG. 6A shows the results of the first experiment, in which the native alpha pheromones from Fusarium spp. (Fusarium ph., WCTWKGQPCW (SEQ ID NO: 2182)), Botrytis spp. (Botrytis Ph., WCGRPGQPC (SEQ ID NO: 2183)), and Saccharomyces cerevisiae (Yeast Ph., WHWLQLKPGQPMY (SEQ ID NO: 2184)), as well as a synthetic peptide (Scr. Yeast 1, WKMGQYHQLPPLW (SEQ ID NO: 2185)), and a modified Saccharomyces cerevisiae alpha pheromone with a C-terminus glycine cap (Yeast Pep-Gly, WHWLQLKPGQPMYG (SEQ ID NO: 2186)) were tested at a concentration of 375 μM. FIG. 6B shows the results of the second experiment, in which the native alpha pheromones from Fusarium spp. ((Fusarium ph., WCTWKGQPCW (SEQ ID NO: 2182)), Botrytis spp. (Botrytis Ph., WCGRPGQPC (SEQ ID NO: 2183)), and Saccharomyces cerevisiae (Yeast Ph., WHWLQLKPGQPMY (SEQ ID NO: 2184)), as well as a synthetic peptide (Scr. Yeast 1, WKMGQYHQLPPLW (SEQ ID NO: 2185)), and a modified Saccharomyces cerevisiae alpha pheromone with a C-terminus glycine cap (Yeast Pep-Gly, WHWLQLKPGQPMYG (SEQ ID NO: 2186)) were tested at a concentration of 375 μM and viability was measured at 51 hours after addition of resazurin. FIG. 6C shows the results of the third experiment, in which the native alpha pheromones from Fusarium spp. (HH1, WCTWKGQPCW (SEQ ID NO: 2182)), Botrytis spp. (HH2, WCGRPGQPC (SEQ ID NO: 2183)), and Saccharomyces cerevisiae (HH3, WHWLQLKPGQPMY (SEQ ID NO: 2184)), as well as a synthetic peptide (HH31, WKMGQYHQLPPLW (SEQ ID NO: 2185)), a modified Saccharomyces cerevisiae alpha pheromone with a C-terminus glycine cap (HH35, WHWLQLKPGQPMYG (SEQ ID NO: 2186)), a modified Saccharomyces cerevisiae alpha pheromone with a N-terminus glycine cap (HH36, GWHWLQLKPGQPMY (SEQ ID NO: 2187)), a peptide having the sequence of contiguous tandem copies of the Saccharomyces cerevisiae alpha pheromone (HH37, WHWLQLKPGQPMYWHWLQLKPGQPMY (SEQ ID NO: 2188)), and a peptide having the sequence of tandem copies of the Saccharomyces cerevisiae alpha pheromone separated by a four-glycine linking segment (HH38, WHWLQLKPGQPMYGGGGSWHWLQLKPGQPMY (SEQ ID NO: 2189)) were tested at concentrations of 175 μM and 375 μM. In FIGS. 6A-6C, the controls used were: untreated, 50% ethanol (negative control), and the fungicide fenpiclonil (positive control).

[0015] FIG. 7 shows the results of experiments to test fungal lesion size on Nicotiana benthamiana leaves after treatment with Botrytis cinerea conidial suspension followed by 5 mM MES buffer (“MES”) or 275 micromolar CGI factor “HH38” 9SEQ ID NO: 2189) in 5 mM MES buffer (or no addition as “Untreated” control).

### DETAILED DESCRIPTION

[0016] Unless defined otherwise, all technical and scientific terms used have the same meaning as commonly understood by one of ordinary skill in the art to which this invention belongs. Conventional methods are used for the procedures described herein, such as those provided in the art, and demonstrated in the Examples and various general references. Unless otherwise stated, nucleic acid sequences described herein are given, when read from left to right, in the 5′ to 3′ direction. Nucleic acid sequences may be provided as DNA or as RNA, as specified; disclosure of one necessarily defines the other, as is known to one of ordinary skill in the art. Furthermore, because of known codon degeneracy, different nucleic acid sequences can encode the same polypeptide sequence, and such modified nucleic acid sequences (e.g., for the purposes of codon optimization for a given species) are within the scope of the present disclosure.

[0017] The term “comprise” is intended to mean “include”. Where a term is provided in the singular, it also contemplates aspects of the invention described by the plural of that term. The term “and/or” where used herein is to be taken as specific disclosure of each of the multiple specified features or components with or without another. Thus, the term “and/or” as used in a phrase such as “A and/or B” herein is intended to include “A and B,” “A or B,” “A” (alone), and “B” (alone). Likewise, the term “and/or” as used in a phrase such as “A, B, and/or C” is intended to encompass each of the following embodiments: A, B, and C; A, B, or C; A or C; A or B; B or C; A and C; A and B; B and C; A (alone); B (alone); and C (alone).

[0018] The following description sets forth exemplary methods, parameters, and the like. It should be recognized, however, that such description is not intended as a limitation on the scope of the present disclosure but is instead provided as a description of exemplary embodiments.

### Antifungal or Fungicidal Peptides

[0019] An aspect of the disclosure provides a conidial germination-inhibiting (CGI) factor, a CGI factor precursor, a CGI factor fragment, or a CGI factor motif for fungal control, wherein fungal control includes inhibition or reduction of conidial germination, fungal growth, or fungal reproduction, or is fungicidal (able to kill the fungus). A “CGI factor fragment” refers to an amino acid sequence that is reduced by one amino acid or two amino acids relative to a CGI factor, while retaining the function of the CGI factor. A “CGI factor precursor” is a polypeptide that includes at least one copy of a CGI factor (in embodiments, two or more copies of a CGI factor or multiple different CGI factors) and that is processed to the mature CGI factor(s), e.g., through proteolytic cleavage. CGI factor precursors include precursors with sequences encoded natively in one or more fungal genomes, as well as precursors having synthetic sequences. An “active” CGI factor, CGI factor precursor, or CGI factor fragment refers to a CGI factor, CGI factor precursor, or CGI factor fragment that is able to inhibit fungal conidial germination activity (conidial germination inhibitory), fungal growth, or fungal reproduction. A “toxic” CGI factor, CGI factor precursor, or CGI factor fragment refers to a CGI factor, CGI factor precursor, or CGI factor fragment that is able to kill a fungus or that decreases the number of viable cells in a population of fungal cells (i.e., is fungicidal). A CGI factor, CGI factor precursor, or CGI factor fragment may be active without being toxic, or may be toxic without being active, or may be both active and toxic. Both active and/or toxic CGI factors, CGI factor precursors, or CGI factor fragments are CGI factors, CGI factor precursors, or CGI factor fragments of the present disclosure.

[0020] The CGI factor motif includes the sequence WX₁WX₂X₃X₄X₅X₆GX-PX₈Y (SEQ ID NO: 1921). In this sequence, X₁ is selected from the group of T, E, K, Q, S, R, G and H; X₂ is selected from the group of G, I, V and L; X₃ is selected from the group of A, T, K, E, N, S, R and Q; X₄ is selected from the group of I, F and L; X₅ is selected from the group of E, A, Y, Q, M, F, S, G, D, R and K; X₆ is selected from the group of N, T, L, A, Y, I, W, V, M, K, R and P; X₇ is selected from the group of A, E, and Q; and X₈ is selected from the group of F, L, I, and M. The CGI factor motif may be SEQ ID NO: 1922, SEQ ID NO: 1923, SEQ ID NO: 1924, SEQ ID NO: 1925, SEQ ID NO: 1926, SEQ ID NO: 1927, SEQ ID NO: 1928, SEQ ID NO: 1929, SEQ ID NO: 1930, SEQ ID NO: 1931, SEQ ID NO: 1932, SEQ ID NO: 1933, SEQ ID NO: 1934, SEQ ID NO: 1935, SEQ ID NO: 1936, SEQ ID NO: 1937, SEQ ID NO: 1938, SEQ ID NO: 1939, SEQ ID NO: 1940, SEQ ID NO: 1941, SEQ ID NO: 1942, SEQ ID NO: 1943, SEQ ID NO: 1944, SEQ ID NO: 1945, SEQ ID NO: 1946, SEQ ID NO: 1947, SEQ ID NO: 1948, SEQ ID NO: 1949, SEQ ID NO: 1950, SEQ ID NO: 1951, SEQ ID NO: 1952, SEQ ID NO: 1953, SEQ ID NO: 1954, SEQ ID NO: 1955, or SEQ ID NO: 1956, each of which represents a motif subset of the sequence WX₁WX₂X₃X₄X₅X₆GX₇PX₈Y (SEQ ID NO: 1921).

[0021] In some embodiments, the CGI factor, CGI factor precursor, CGI factor fragment, or CGI factor motif is applied to a plant, a plant part, a harvested part of a plant, a seed, or an area to be planted to control any variety of fungal plant pathogens. Plants and plant cells are of any species of interest, including dicots and monocots. Plants of interest include row crop plants, fruit-producing plants and trees, vegetables, trees, and ornamental plants including ornamental flowers, shrubs, trees, groundcovers, and turf grasses. Examples of commercially important cultivated crops, trees, and plants include: alfalfa (Medicago sativa), almonds (Prunus dulcis), apples (Malus x domestica), apricots (Prunus armeniaca, P. brigantine, P. mandshurica, P. mume, P. sibirica), artichoke (Cynara cardunculus var. scolymus), asparagus (Asparagus officinalis), avocado (Persea americana), bananas (Musa spp.), barley (Hordeum vulgare), beans (Phaseolus spp.), blueberries and cranberries (Vaccinium spp.), Brazil nut (Bertholletia excelsa), cacao (Theobroma cacao), calamansi (Citrus x microcarpa), canola and rapeseed or oilseed rape, (Brassica napus), Polish canola (Brassica rapa), and related cruciferous vegetables including broccoli, kale, cabbage, and turnips (Brassica carinata, B. juncea, B. oleracea, B. napus, B. nigra, and B. rapa, and hybrids of these), carnation (Dianthus caryophyllus), carrots (Daucus carota sativus), cashew (Anacardium occidentale), cassava (Manihot esculentum), celery (Apium graveolens), cherry (Prunus avium), chestnut (Castanea spp.), chickpea or garbanzo (Cicer arietinum), chicory (Cichorium intybus), chili peppers and other capsicum peppers (Capsicum annuum, C. frutescens, C. chinense, C. pubescens, C. baccatum), chrysanthemums (Chrysanthemum spp.), citron (Citrus medica), coconut (Cocos nucifera), coffee (wild and domesticated Coffea spp. including Coffea arabica, Coffea canephora, and Coffea liberica), cotton (Gossypium hirsutum L.), cowpea (Vigna unguiculata and other Vigna spp.), fava beans (Vicia faba), cucumber (Cucumis sativus), currants and gooseberries (Ribes spp.), date (Phoenix dactylifera), duckweeds (family Lemnoideae), eggplant or aubergine (Solanum melongena), elderberries (Sambucus spp.), eucalyptus (Eucalyptus spp.), flax (Linum usitatissumum L.), geraniums (Pelargonium spp.), ginger (Zingiber officinale), ginseng (Panax spp.), grapefruit (Citrus x paradisi), grapes (Vitis spp.) including wine grapes (Vitis vinifera and hybrids thereof), guava (Psidium guajava), hazelnut (Corylus avellana, Corylus spp.), hemp and cannabis (Cannabis sativa and Cannabis spp.), hops (Humulus lupulus), horseradish (Armoracia rusticana), irises (Iris spp.), jackfruit (Artocarpus heterophyllus), kiwifruits (Actinidia spp.), kumquat (Citrus japonica), lemon (Citrus limon), lentil (Lens culinaris), lettuce (Lactuca sativa), limes (Citrus spp.), lychee (Litchi chinensis), macadamias (Macadamia spp.), maize or corn (Zea mays L.), mandarin (Citrus reticulata), mango (Mangifera indica), mangosteen (Garcinia mangostana), melon (Cucumis melo), millets (Setaria spp., Echinochloa spp., Eleusine spp., Panicum spp., Pennisetum spp.), oats (Avena sativa), oil palm (Ellis quineensis), okra (Abelmoschus esculentus), olive (Olea europaea), onion (Allium cepa) and other alliums (Allium spp.), orange (Citrus sinensis), papaya (Carica papaya), parsnip (Pastinaca sativa), passionfruit (Passiflora edulis), pecan (Carya illinoinensis), peaches and nectarines (Prunus persica), pear (Pyrus spp.), pea (Pisum sativum), peanut (Arachis hypogaea), peonies (Paeonia spp.), persimmons (Diospyros kaki, Diospyros spp.), petunias (Petunia spp.), pineapple (Ananas comosus), pistachio (Pistacia vera), plantains (Musa spp.), plum (Prunus domestica), poinsettia (Euphorbia pulcherrima), pomelo (Citrus maxima), poplar (Populus spp.), potato (Solanum tuberosum), pumpkins and squashes (Cucurbita pepo, C. maxima, C. moschata), quince (Cydonia oblonga), raspberries (Rubus idaeus, Rubus occidentalis, Rubus spp.), rhubarbs (Rheum spp.), rice (Oryza sativa L.), roses (Rosa spp.), rubber (Hevea brasiliensis), rye (Secale cereale), safflower (Carthamus tinctorius L), satsuma (Citrus unshiu), sesame seed (Sesame indium), sorghum (Sorghum bicolor), sour orange (Citrus x aurantium), soursop (Annona muricata), soybean (Glycine max L.), strawberries (Fragaria spp., Fragaria x ananassa), sugar beet (Beta vulgaris), sugarcanes (Saccharum spp.), sunflower (Helianthus annuus), sweet potato (Ipomoea batatas), tamarind (Tamarindus indica), tangerine (Citrus tangerina), tea (Camellia sinensis), tobacco (Nicotiana tabacum L.), tomatillo (Physalis philadelphica), tomato (Solanum lycopersicum or Lycopersicon esculentum), tulips (Tulipa spp.), walnuts (Juglans spp. L.), watermelon (Citrulus lanatus), wheat (Triticum aestivum), and yams (Discorea spp.). Wild relatives of domesticated plants are also of interest.

[0022] Exemplary diseases which may be treated, with causative pathogen shown in parenthesis, include Alternaria Leaf and Fruit Spot (Alternaria alternata), Anthracnose (Colletotrichum acutatum), Leaf Blight (Seimatosporium lichenicola), Leaf Rust (Tranzschelia discolor), Scab (Cladosporium carpophilum), Shot Hole (Wilsonomyces carpophilus), Brown Rot Blossom Blight (Monilinia laxa, M. fructicola), Black Sigatoka (Mycosphaerella fijiensis), Yellow Sigatoka (Mycosphaerella musicola), Alternaria Fruit Rot (Alternaria spp.), Anthracnose Fruit Rot (Colletotrichum gloeosporoides), Botryosphaeria Canker (Botryosphaeria spp.), Leaf Spot and Blotch (Mycosphaerella spp., Septoria spp.), Mummyberry (Monilinia vaccinii-corymbosi), Phomopsis Leaf Spot, Twig Blight and Stem Canker (Phomopsis vaccinii), Powdery Mildew (Sphaerotheca spp.), Septoria Blight (Septoria spp.), Spur Blight (Didymella spp., Phoma spp.), Anthracnose (Spaceloma necator, Elsinoë veneta), Botryosphaeria Canker (Botryosphaeria dothidea), Colletotrichum Rot (Colletotrichum gloeosporioides), Leaf Spot and Blotch (Mycosphaerella spp., Septoria rubi, Sphaerulina rubi), Powdery Mildew (Sphaerotheca macularis, Microphaera spp., Oidium spp.), Rosette or Double Blossom of Blackberries (Cercosporella rubi), Spur Blight (Didymella applanata), Blackberry Rust (Phragmidium spp.), Anthracnose (Colletotrichum fragariae), Leather Rot (Phytophthora cactorum), Powdery Mildew (Sphaerotheca macularis), Botrytis grey mould on Foliage (Botrytis cinerea), Seedling Root Rot, Basal Stem Rot (Rhizoctonia solani), Cottonball (Monilinia oxycocci), Fruit Rots (Physalospora vaccinia, Glomerella cingulata, Coleophoma empetri), Lophodermium Twig Blight (Lophodermium spp.), Fairy Ring Suppression (Psilocybe spp.), Albinism (Alternaria alternata pv citri), Alternaria Leaf and Fruit Spot (Alternaria citri), Anthracnose (Colletotrichum acutatum, C. gloeosporioides), Cercospora Leaf Spot (Cercospora spp.), Diplodia Stem-End Rot (Diplodia natalensis), Greasy Spot (Mycosphaerella citri), Melanose (Diaporthe citri), Penicillium Decays, Green Mold, Whisker Mold, Blue Mold (Penicillium spp.), Phomopsis Stem-End Rot (Phomopsis citrii), Post Bloom Fruit Drop (PFD) (Colletotrichum acutatum), Powdery Mildew (Erysiphe spp.), Scab (Elsinoe fawcettii), Sweet Orange Scab (Elsinoe australis), Black Spot (Guignardia citricarpa), Black Rot (Guignardia bidwellii), Downy Mildew (Plasmopara viticola), Phomopsis Cane and Leaf Spot (Phomopsis viticola), Powdery Mildew (Uncinula necator), Botrytis Bunch Rot (Botrytis cinerea), Aspergillus Crown Rot (Aspergillus niger), Pythium Damping Off (Pythium spp.), Stem Rot/White Mold (Sclerotium rolfsii), Rhizoctonia Peg and Pod Rot (Rhizoctonia solani), Stem Rot/White Mold (Sclerotium rolfsii), Cylindrocladium Black Rot (Cylindocladium crotalariae), Pythium Pod Rot (Pythium myriotylum), Alternaria Late Blight (Alternaria alternata), Botryosphaeria Panicle and Shoot Blight (Botryosphaeria dothidea), Septoria Leaf Spot (Septoria pistaciarum), Scab (Cladosporium carpophilum), Alternaria Spot and Fruit Rot (Alternaria alternata), Anthracnose (Colletotrichum prunicola, C. gloeosporioides), Leaf Rust (Tranzschelia discolor), Powdery Mildew (Sphaerotheca pannosa, Podosphaera clandestina), Shot Hole (Wilsonomyces carpophilus), Alternaria Leaf Spot (Alternaria spp., A. alternata), Ascochyta Leaf Spot (Ascochyta cynarae), Phyllostica Leaf Spot (Phyllostica spp.), Rust (Uromyces betae, Puccinia helianthi), White Rust (Albugo tragopogonis), Anthracnose (Colletotrichum acutatum, Glomerella cingulata), Eastern Filbert Blight (Anisogramma anomale), Late Blight (Alternaria alternata), Scab (Cladosporium carpophilum), Septoria Leaf Spot (Septoria pistaciarum), Shot Hole (Wilsonomyces carpophilus), Blossom Blight (Monilinia laxa, M. fructicola), Powdery Mildew (Erysiphe spp.), Rust (Puccinia spp.), Alternaria black spot (Alternaria brassicae), Black leg/Phoma (Leptosphaeria maculans), Cercospora leaf spot (C. brassicicola), Head rot (Rhizoctonia solani), Leaf spot and pod rot (Alternaria alternata), Powdery mildew (Erysiphe polygoni), Southern blight (Sclerotium rolfsii), Anthracnose leaf blight (Colletotrichum graminicola), Gray leaf spot (Cercospora sorghi), Northern corn leaf blight (Setosphaeria turcica), Northern corn leaf spot (Cochliobolus carbonum), Common Rust (Puccinia sorghi), Southern Rust (P. polysora), Southern corn leaf blight (Cochliobolus heterostrophus), Eye spot (Aureobasidium zeae), Physoderma brown spot (P. maydis), Yellow Leaf Blight (Phyllosticta maydis), Ascochyta blight (A. gossypii), Rust (Puccinia schedonnardi, P. cacabata), Rhizoctonia leaf and stem diseases (R. solani), Target spot (Corynespora cassiicola), Southern blight (Sclerotium rolfsii), Rhizoctonia limb rot (R. solani), Cylindrocladium black rot (C. crotalaria), White mold (Sclerotinia minor), Early leaf spot (Cercospora arachidicola), Late leaf spot (Cercosporidium personatum), Web blotch (Phoma arachidicola), Rust (Puccinia arachidis), Pepper Spot (Leptospherulina crassiasca), Southern stem rot (Sclerotium rolfsii), Rhizoctonia limb rot (R. solani), Cylindrocladium black rot (C. crotalaria), White mold (Sclerotinia minor), Anthracnose (Colletotrichum lindemuthianum), Ascochyta blight (A. phaseolorum), Cercospora leaf blotch (C. cruenta), Downy mildew (Phytophthora nicotianae), Rust (Uromyces appendiculatus), Anthracnose (ripe rot) (C. gloeosporoides), Mummy berry (M. vacciniicorymbosi), Rust (Pucciniastrum vaccinii), Septoria leaf spot (Septoria albopunctata), Downy mildew (Peronospora parasitica), Alternaria leaf blight (A. dauci), Cercospora leaf spot (C. carotae), Basal stalk rot (Rhizoctonia solani), Early blight (Cercospora apii), Late blight (Septoria apicola), Verticillium brown spot and dry bubble, Pink rot (Sclerotinia sclerotiorum), Lophodermium leaf/twig blight (L. hypophyllum), Upright dieback (Phomopsis vaccinii), Anthracnose (Colletotrichum spp.), Downy mildew (Pseudoperonospora cubensis), Target spot (Corynespora cassiicola), Alternaria leaf blight (A. cucumerina), Alternaria leaf spot (A. alternata), Cercospora leaf spot (C. citrullina), Gummy stem blight/vine decline (Didymella bryoniae), Powdery mildew (Sphaerotheca only), Scab (Cladosporium cucumerinum), Anthracnose (Colletotrichum spp.), Botrytis leaf mold (Botrytis cinerea), Cercospora leaf spot (Cercospora spp.), Powdery mildew (Leveillula taurica), Purple blotch (Alternaria porri), Botrytis neck rot, Downy mildew (Peronospora destructor), Early leaf spot (Cercospora arachidicola), Late leaf spot (Cercosporidium personatum), Pepper spot (Leptosphaerulina crassiasca), Black dot (Colletotrichum coccodes), Botrytis vine rot (B. cinerea), Early blight (Alternaria solani), Late blight (Phytophthora infestans), Anthracnose (Colletotrichum truncatum), Cercospora leaf blight (C. kikuchii), Diaporthe pod and stem rot (D. phaseolorum), Frogeye leaf spot (Cercospora sojina), Purple seed stain (C. kikuchii), Septoria brown spot (S. glycines), Rust (Phakopsora pachyrhizi), Stem canker (Diaporthe phaseolorum), Early blight (Alternaria solani), Gray leaf mold (Fluvia fluva; Cladosporium), Gray leaf spot (Stemphyllium botryosum), Late blight (Phytophthora infestans), Septoria leaf spot (S. lycopersici), Target spot (Corynespora cassiicola), Alternaria fruit rot (black mold) (A. alternata), Anthracnose (Colletotrichum spp.), Botrytis gray mold (B. cinerea), Late blight fruit rot (P. infestans), Rhizoctonia fruit rot (R. solani), Anthracnose (Colletotrichum gloeosporioides), Anthracnose (Colletotrichum acutatum), Blossom blight/brown rot (Monilinia spp.), Scab (Venturia carpophila), Shot hole (Wilsonomyces carpophilus), Leaf curl (Taphrina deformans), Black knot (cherry, plum) (Apiosporina morbosa), Cherry leaf spot (Blumeriella jaapii), Scab (Cladosporium carpophilum), Interior needle blight (Mycosphaerella spp. and Phaeocryptopus nudus), Swiss needlecast (Phaeocryptopus gaeumannii), Interior needle blight (Mycosphaerella spp. and Phaeocryptopus nudus), Scleroderris canker (Gremmeniella abietina), Leaf rust (Thekopsora minima), Powdery mildew (Erysiphe necator), Alternaria rot (A. alternata), Angular leaf spot (Mycosphearella angulata), Anthracnose (Elsinoe ampelina), Black Rot (Guignardia bidwellii), Leaf Blight (Pseudocercospora vitis), Phomopsis cane and leaf spot (P. viticola), Rotbrenner (Pseudopezicula tracheiphila), Septoria leaf spot (S. ampelina), Apple Scab (Venturia inaequalis), Pear Scab (V. piris), Alternaria blotch, Alternaria rot (Alternaria spp.), Cedar apple rust (Gymnosporangium juniper-virginianae), Powdery mildew (Podosphaera leucotricha), Quince rust (Gymnosporangium spp.), Flyspeck and Sooty blotch, Bitter rot (Glomerella cingulata), Black rot (Botryosphaeria obtusa), Brooks fruit spot (Mycosphaerella pomi), White rot (Botryosphaeria dothidea), Alternaria rot and surface mold, Bitter rot Blue mold, Bull's-eye rot, Gray mold, Phacidiopycnis rot, Rhizopus rot, Speck rot, Sphaeropsis rot, White rot, Damping off (Pythium spp.), Root Rot (Phytophthora spp.), Leather rot (P. cactorum), Red stele (P. fragariae), Vascular collapse (P. cactorum), Basal stem rot (Phytophthora spp.), Crown rot (Phytophthora capsici), Downy Mildew (Peronospora effusa; P. farinosa), White rust (Albugo occidentalis), Pink rot (Phytophthora erythroseptica), Pythium leak, Pythium seedling disease (Pythium spp.), Phytophthora root and stem rot (Phytophthora megasperma), Pythium damping off (Pythium spp.), Collar rot, Crown rot, Root rot (Phytophthora spp.), Crown rot, Spear rot (Phytophthora spp.), Root Rot (Phytophthora cinnamomi), Downy mildew (Peronospora parasitica), Brown rot, Citrus foot rot, Gummosis, Root rot, Trunk canker (Phytophthora spp.), or Downy mildew (Bremia lactucae). From an agricultural or horticultural perspective, and for the purposes of this application, some of the pathogens and diseases listed above are considered “fungal” although the causative pathogen is technically an oomycete (phylum Oomycota), including, but not limited to Pythion spp., Phytophthora spp., Peronospora spp., Plasmopara spp., Albugo spp., and Bremia spp.

[0023] When applying to a harvested part of a plant (also referred to herein as post-harvest), application may be by a variety of treatment methods, e.g. dip, drip, drench, spray, or fog. In alternative embodiments, the harvested plant part has applied to it a composition, such as a film or membrane, containing the CGI factor, CGI factor precursor, or CGI factor fragment, or is packaged in a container that includes the CGI factor, CGI factor precursor, or CGI factor fragment. Such treatments, compositions, and containers are further useful for protecting foodstuffs (e.g., processed food products such as bakery goods or processed fruit or vegetables) from fungal growth and spoilage. Any of the plants or plant parts described above may be treated post-harvest. In some embodiments, plants treated post-harvest will include alfalfa, almonds, apples, apricots, artichoke, asparagus, avocado, bananas, barley, beans, blueberries and cranberries, Brazil nut, cacao, calamansi, canola and rapeseed or oilseed rape, Polish canola, and related cruciferous vegetables including broccoli, kale, cabbage, and turnips, carnation, carrots, cashew, cassava, celery, cherry, chestnut, chickpea or garbanzo, chicory, chili peppers and other capsicum peppers, chrysanthemums, citron, coconut, coffee, cotton, cowpea, fava beans, cucumber, currants and gooseberries, date, duckweeds, eggplant or aubergine, elderberries, eucalyptus, flax, geraniums, ginger, ginseng, grapefruit, grapes including wine grapes, guava, hazelnut, hemp and cannabis, hops, horseradish, irises, jackfruit, kiwifruits, kumquat, lemon, lentil, lettuce, limes, lychee, macadamias, maize or corn, mandarin, mango, mangosteen, melon, millets, oats, oil palm, okra, olive, onion and other alliums, orange, papaya, parsnip, passionfruit, pecan, peaches and nectarines, pear, pea, peanut, peonies, persimmons, petunias, pineapple, pistachio, plantains, plum, poinsettia, pomelo, poplar, potato, pumpkins and squashes, quince, raspberries, rhubarbs, rice, roses, rubber, rye, safflower, satsuma, sesame seed, sorghum, sour orange, soursop, soybean, strawberries, sugar beet, sugarcanes, sunflower, sweet potato, tamarind, tangerine, tea, tobacco, tomatillo, tomato, tulips, walnuts, watermelon, wheat, and yams.

[0024] In some embodiments, the CGI factor, CGI factor precursor, CGI factor fragment, or CGI factor motif is active and/or toxic to a structural element fungal pathogen (e.g., a fungal pathogen that infests or damages human-built structures such as buildings or other human-created artifacts, or components thereof). In some embodiments, the CGI factor, CGI factor precursor, CGI factor fragment, or CGI factor motif inhibits growth or reproduction of or is toxic to a fungus that damages wood or other materials useful in human-built structures or artifacts; examples include wood-decaying fungi that cause brown rot, white rot, or soft rot, or fungi that cause dry rot in human-built structures or buildings. In some embodiments, the structural element fungal pathogen is dry rot fungus (Serpula lacrymans), cellar rot fungus (Coniphora puteana), a wet rot fungus (Antrodia vaillantii, A. xantha, Asterostroma spp., Donkioporia expansa, Paxillus panuoides, Phellinus contignuus, Tyromyces placentus), or a fungus that colonizes water-damaged structural materials, e.g., Penicillium chrysogenum, Aspergillus versicolor, Chaetomium spp., Acremonium spp., Ulocladium spp., Stachybotrys spp., Arthrinium phaeospermum, Aureobasidium pullulans, Cladosporium herbarum, Trichoderma spp., Aspergillus fumigatus, Aspergillus melleus, Aspergillus niger, Aspergillus ochraceus, Mucor racemosus, or Mucor spinosus.

### Recombinant DNA Constructs and Vectors

[0025] An aspect of the disclosure includes a recombinant DNA construct including: a heterologous promoter operably linked to a nucleic acid molecule including a nucleotide sequence that encodes a conidial germination-inhibiting (CGI) factor, a CGI factor precursor, or a CGI factor fragment, wherein the nucleotide sequence (a) encodes at least one CGI factor including an amino acid sequence that has at least 50%, at least 55%, at least 60%, at least 65%, at least 70%, at least 75%, at least 80%, at least 85%, at least 90%, at least 91%, at least 92%, at least 93%, at least 94%, at least 95%, at least 96%, at least 97%, at least 98%, at least 99%, or 100% sequence identity with at least one of SEQ ID NO: 961, SEQ ID NO: 962, SEQ ID NO: 963, SEQ ID NO: 964, SEQ ID NO: 965, SEQ ID NO: 966, SEQ ID NO: 967, SEQ ID NO: 968, SEQ ID NO: 969, SEQ ID NO: 970, SEQ ID NO: 971, SEQ ID NO: 972, SEQ ID NO: 973, SEQ ID NO: 974, SEQ ID NO: 975, SEQ ID NO: 976, SEQ ID NO: 977, SEQ ID NO: 978, SEQ ID NO: 979, SEQ ID NO: 980, SEQ ID NO: 981, SEQ ID NO: 982, SEQ ID NO: 983, SEQ ID NO: 984, SEQ ID NO: 985, SEQ ID NO: 986, SEQ ID NO: 987, SEQ ID NO: 988, SEQ ID NO: 989, SEQ ID NO: 990, SEQ ID NO: 991, SEQ ID NO: 992, SEQ ID NO: 993, SEQ ID NO: 994, SEQ ID NO: 995, SEQ ID NO: 996, SEQ ID NO: 997, SEQ ID NO: 998, SEQ ID NO: 999, SEQ ID NO: 1000, SEQ ID NO: 1001, SEQ ID NO: 1002, SEQ ID NO: 1003, SEQ ID NO: 1004, SEQ ID NO: 1005, SEQ ID NO: 1006, SEQ ID NO: 1007, SEQ ID NO: 1008, SEQ ID NO: 1009, SEQ ID NO: 1010, SEQ ID NO: 1011, SEQ ID NO: 1012, SEQ ID NO: 1013, SEQ ID NO: 1014, SEQ ID NO: 1015, SEQ ID NO: 1016, SEQ ID NO: 1017, SEQ ID NO: 1018, SEQ ID NO: 1019, SEQ ID NO: 1020, SEQ ID NO: 1021, SEQ ID NO: 1022, SEQ ID NO: 1023, SEQ ID NO: 1024, SEQ ID NO: 1025, SEQ ID NO: 1026, SEQ ID NO: 1027, SEQ ID NO: 1028, SEQ ID NO: 1029, SEQ ID NO: 1030, SEQ ID NO: 1031, SEQ ID NO: 1032, SEQ ID NO: 1033, SEQ ID NO: 1034, SEQ ID NO: 1035, SEQ ID NO: 1036, SEQ ID NO: 1037, SEQ ID NO: 1038, SEQ ID NO: 1039, SEQ ID NO: 1040, SEQ ID NO: 1041, SEQ ID NO: 1042, SEQ ID NO: 1043, SEQ ID NO: 1044, SEQ ID NO: 1045, SEQ ID NO: 1046, SEQ ID NO: 1047, SEQ ID NO: 1048, SEQ ID NO: 1049, SEQ ID NO: 1050, SEQ ID NO: 1051, SEQ ID NO: 1052, SEQ ID NO: 1053, SEQ ID NO: 1054, SEQ ID NO: 1055, SEQ ID NO: 1056, SEQ ID NO: 1057, SEQ ID NO: 1058, SEQ ID NO: 1059, SEQ ID NO: 1060, SEQ ID NO: 1061, SEQ ID NO: 1062, SEQ ID NO: 1063, SEQ ID NO: 1064, SEQ ID NO: 1065, SEQ ID NO: 1066, SEQ ID NO: 1067, SEQ ID NO: 1068, SEQ ID NO: 1069, SEQ ID NO: 1070, SEQ ID NO: 1071, SEQ ID NO: 1072, SEQ ID NO: 1073, SEQ ID NO: 1074, SEQ ID NO: 1075, SEQ ID NO: 1076, SEQ ID NO: 1077, SEQ ID NO: 1078, SEQ ID NO: 1079, SEQ ID NO: 1080, SEQ ID NO: 1081, SEQ ID NO: 1082, SEQ ID NO: 1083, SEQ ID NO: 1084, SEQ ID NO: 1085, SEQ ID NO: 1086, SEQ ID NO: 1087, SEQ ID NO: 1088, SEQ ID NO: 1089, SEQ ID NO: 1090, SEQ ID NO: 1091, SEQ ID NO: 1092, SEQ ID NO: 1093, SEQ ID NO: 1094, SEQ ID NO: 1095, SEQ ID NO: 1096, SEQ ID NO: 1097, SEQ ID NO: 1098, SEQ ID NO: 1099, SEQ ID NO: 1100, SEQ ID NO: 1101, SEQ ID NO: 1102, SEQ ID NO: 1103, SEQ ID NO: 1104, SEQ ID NO: 1105, SEQ ID NO: 1106, SEQ ID NO: 1107, SEQ ID NO: 1108, SEQ ID NO: 1109, SEQ ID NO: 1110, SEQ ID NO: 1111, SEQ ID NO: 1112, SEQ ID NO: 1113, SEQ ID NO: 1114, SEQ ID NO: 1115, SEQ ID NO: 1116, SEQ ID NO: 1117, SEQ ID NO: 1118, SEQ ID NO: 1119, SEQ ID NO: 1120, SEQ ID NO: 1121, SEQ ID NO: 1122, SEQ ID NO: 1123, SEQ ID NO: 1124, SEQ ID NO: 1125, SEQ ID NO: 1126, SEQ ID NO: 1127, SEQ ID NO: 1128, SEQ ID NO: 1129, SEQ ID NO: 1130, SEQ ID NO: 1131, SEQ ID NO: 1132, SEQ ID NO: 1133, SEQ ID NO: 1134, SEQ ID NO: 1135, SEQ ID NO: 1136, SEQ ID NO: 1137, SEQ ID NO: 1138, SEQ ID NO: 1139, SEQ ID NO: 1140, SEQ ID NO: 1141, SEQ ID NO: 1142, SEQ ID NO: 1143, SEQ ID NO: 1144, SEQ ID NO: 1145, SEQ ID NO: 1146, SEQ ID NO: 1147, SEQ ID NO: 1148, SEQ ID NO: 1149, SEQ ID NO: 1150, SEQ ID NO: 1151, SEQ ID NO: 1152, SEQ ID NO: 1153, SEQ ID NO: 1154, SEQ ID NO: 1155, SEQ ID NO: 1156, SEQ ID NO: 1157, SEQ ID NO: 1158, SEQ ID NO: 1159, SEQ ID NO: 1160, SEQ ID NO: 1161, SEQ ID NO: 1162, SEQ ID NO: 1163, SEQ ID NO: 1164, SEQ ID NO: 1165, SEQ ID NO: 1166, SEQ ID NO: 1167, SEQ ID NO: 1168, SEQ ID NO: 1169, SEQ ID NO: 1170, SEQ ID NO: 1171, SEQ ID NO: 1172, SEQ ID NO: 1173, SEQ ID NO: 1174, SEQ ID NO: 1175, SEQ ID NO: 1176, SEQ ID NO: 1177, SEQ ID NO: 1178, SEQ ID NO: 1179, SEQ ID NO: 1180, SEQ ID NO: 1181, SEQ ID NO: 1182, SEQ ID NO: 1183, SEQ ID NO: 1184, SEQ ID NO: 1185, SEQ ID NO: 1186, SEQ ID NO: 1187, SEQ ID NO: 1188, SEQ ID NO: 1189, SEQ ID NO: 1190, SEQ ID NO: 1191, SEQ ID NO: 1192, SEQ ID NO: 1193, SEQ ID NO: 1194, SEQ ID NO: 1195, SEQ ID NO: 1196, SEQ ID NO: 1197, SEQ ID NO: 1198, SEQ ID NO: 1199, SEQ ID NO: 1200, SEQ ID NO: 1201, SEQ ID NO: 1202, SEQ ID NO: 1203, SEQ ID NO: 1204, SEQ ID NO: 1205, SEQ ID NO: 1206, SEQ ID NO: 1207, SEQ ID NO: 1208, SEQ ID NO: 1209, SEQ ID NO: 1210, SEQ ID NO: 1211, SEQ ID NO: 1212, SEQ ID NO: 1213, SEQ ID NO: 1214, SEQ ID NO: 1215, SEQ ID NO: 1216, SEQ ID NO: 1217, SEQ ID NO: 1218, SEQ ID NO: 1219, SEQ ID NO: 1220, SEQ ID NO: 1221, SEQ ID NO: 1222, SEQ ID NO: 1223, SEQ ID NO: 1224, SEQ ID NO: 1225, SEQ ID NO: 1226, SEQ ID NO: 1227, SEQ ID NO: 1228, SEQ ID NO: 1229, SEQ ID NO: 1230, SEQ ID NO: 1231, SEQ ID NO: 1232, SEQ ID NO: 1233, SEQ ID NO: 1234, SEQ ID NO: 1235, SEQ ID NO: 1236, SEQ ID NO: 1237, SEQ ID NO: 1238, SEQ ID NO: 1239, SEQ ID NO: 1240, SEQ ID NO: 1241, SEQ ID NO: 1242, SEQ ID NO: 1243, SEQ ID NO: 1244, SEQ ID NO: 1245, SEQ ID NO: 1246, SEQ ID NO: 1247, SEQ ID NO: 1248, SEQ ID NO: 1249, SEQ ID NO: 1250, SEQ ID NO: 1251, SEQ ID NO: 1252, SEQ ID NO: 1253, SEQ ID NO: 1254, SEQ ID NO: 1255, SEQ ID NO: 1256, SEQ ID NO: 1257, SEQ ID NO: 1258, SEQ ID NO: 1259, SEQ ID NO: 1260, SEQ ID NO: 1261, SEQ ID NO: 1262, SEQ ID NO: 1263, SEQ ID NO: 1264, SEQ ID NO: 1265, SEQ ID NO: 1266, SEQ ID NO: 1267, SEQ ID NO: 1268, SEQ ID NO: 1269, SEQ ID NO: 1270, SEQ ID NO: 1271, SEQ ID NO: 1272, SEQ ID NO: 1273, SEQ ID NO: 1274, SEQ ID NO: 1275, SEQ ID NO: 1276, SEQ ID NO: 1277, SEQ ID NO: 1278, SEQ ID NO: 1279, SEQ ID NO: 1280, SEQ ID NO: 1281, SEQ ID NO: 1282, SEQ ID NO: 1283, SEQ ID NO: 1284, SEQ ID NO: 1285, SEQ ID NO: 1286, SEQ ID NO: 1287, SEQ ID NO: 1288, SEQ ID NO: 1289, SEQ ID NO: 1290, SEQ ID NO: 1291, SEQ ID NO: 1292, SEQ ID NO: 1293, SEQ ID NO: 1294, SEQ ID NO: 1295, SEQ ID NO: 1296, SEQ ID NO: 1297, SEQ ID NO: 1298, SEQ ID NO: 1299, SEQ ID NO: 1300, SEQ ID NO: 1301, SEQ ID NO: 1302, SEQ ID NO: 1303, SEQ ID NO: 1304, SEQ ID NO: 1305, SEQ ID NO: 1306, SEQ ID NO: 1307, SEQ ID NO: 1308, SEQ ID NO: 1309, SEQ ID NO: 1310, SEQ ID NO: 1311, SEQ ID NO: 1312, SEQ ID NO: 1313, SEQ ID NO: 1314, SEQ ID NO: 1315, SEQ ID NO: 1316, SEQ ID NO: 1317, SEQ ID NO: 1318, SEQ ID NO: 1319, SEQ ID NO: 1320, SEQ ID NO: 1321, SEQ ID NO: 1322, SEQ ID NO: 1323, SEQ ID NO: 1324, SEQ ID NO: 1325, SEQ ID NO: 1326, SEQ ID NO: 1327, SEQ ID NO: 1328, SEQ ID NO: 1329, SEQ ID NO: 1330, SEQ ID NO: 1331, SEQ ID NO: 1332, SEQ ID NO: 1333, SEQ ID NO: 1334, SEQ ID NO: 1335, SEQ ID NO: 1336, SEQ ID NO: 1337, SEQ ID NO: 1338, SEQ ID NO: 1339, SEQ ID NO: 1340, SEQ ID NO: 1341, SEQ ID NO: 1342, SEQ ID NO: 1343, SEQ ID NO: 1344, SEQ ID NO: 1345, SEQ ID NO: 1346, SEQ ID NO: 1347, SEQ ID NO: 1348, SEQ ID NO: 1349, SEQ ID NO: 1350, SEQ ID NO: 1351, SEQ ID NO: 1352, SEQ ID NO: 1353, SEQ ID NO: 1354, SEQ ID NO: 1355, SEQ ID NO: 1356, SEQ ID NO: 1357, SEQ ID NO: 1358, SEQ ID NO: 1359, SEQ ID NO: 1360, SEQ ID NO: 1361, SEQ ID NO: 1362, SEQ ID NO: 1363, SEQ ID NO: 1364, SEQ ID NO: 1365, SEQ ID NO: 1366, SEQ ID NO: 1367, SEQ ID NO: 1368, SEQ ID NO: 1369, SEQ ID NO: 1370, SEQ ID NO: 1371, SEQ ID NO: 1372, SEQ ID NO: 1373, SEQ ID NO: 1374, SEQ ID NO: 1375, SEQ ID NO: 1376, SEQ ID NO: 1377, SEQ ID NO: 1378, SEQ ID NO: 1379, SEQ ID NO: 1380, SEQ ID NO: 1381, SEQ ID NO: 1382, SEQ ID NO: 1383, SEQ ID NO: 1384, SEQ ID NO: 1385, SEQ ID NO: 1386, SEQ ID NO: 1387, SEQ ID NO: 1388, SEQ ID NO: 1389, SEQ ID NO: 1390, SEQ ID NO: 1391, SEQ ID NO: 1392, SEQ ID NO: 1393, SEQ ID NO: 1394, SEQ ID NO: 1395, SEQ ID NO: 1396, SEQ ID NO: 1397, SEQ ID NO: 1398, SEQ ID NO: 1399, SEQ ID NO: 1400, SEQ ID NO: 1401, SEQ ID NO: 1402, SEQ ID NO: 1403, SEQ ID NO: 1404, SEQ ID NO: 1405, SEQ ID NO: 1406, SEQ ID NO: 1407, SEQ ID NO: 1408, SEQ ID NO: 1409, SEQ ID NO: 1410, SEQ ID NO: 1411, SEQ ID NO: 1412, SEQ ID NO: 1413, SEQ ID NO: 1414, SEQ ID NO: 1415, SEQ ID NO: 1416, SEQ ID NO: 1417, SEQ ID NO: 1418, SEQ ID NO: 1419, SEQ ID NO: 1420, SEQ ID NO: 1421, SEQ ID NO: 1422, SEQ ID NO: 1423, SEQ ID NO: 1424, SEQ ID NO: 1425, SEQ ID NO: 1426, SEQ ID NO: 1427, SEQ ID NO: 1428, SEQ ID NO: 1429, SEQ ID NO: 1430, SEQ ID NO: 1431, SEQ ID NO: 1432, SEQ ID NO: 1433, SEQ ID NO: 1434, SEQ ID NO: 1435, SEQ ID NO: 1436, SEQ ID NO: 1437, SEQ ID NO: 1438, SEQ ID NO: 1439, SEQ ID NO: 1440, SEQ ID NO: 1441, SEQ ID NO: 1442, SEQ ID NO: 1443, SEQ ID NO: 1444, SEQ ID NO: 1445, SEQ ID NO: 1446, SEQ ID NO: 1447, SEQ ID NO: 1448, SEQ ID NO: 1449, SEQ ID NO: 1450, SEQ ID NO: 1451, SEQ ID NO: 1452, SEQ ID NO: 1453, SEQ ID NO: 1454, SEQ ID NO: 1455, SEQ ID NO: 1456, SEQ ID NO: 1457, SEQ ID NO: 1458, SEQ ID NO: 1459, SEQ ID NO: 1460, SEQ ID NO: 1461, SEQ ID NO: 1462, SEQ ID NO: 1463, SEQ ID NO: 1464, SEQ ID NO: 1465, SEQ ID NO: 1466, SEQ ID NO: 1467, SEQ ID NO: 1468, SEQ ID NO: 1469, SEQ ID NO: 1470, SEQ ID NO: 1471, SEQ ID NO: 1472, SEQ ID NO: 1473, SEQ ID NO: 1474, SEQ ID NO: 1475, SEQ ID NO: 1476, SEQ ID NO: 1477, SEQ ID NO: 1478, SEQ ID NO: 1479, SEQ ID NO: 1480, SEQ ID NO: 1481, SEQ ID NO: 1482, SEQ ID NO: 1483, SEQ ID NO: 1484, SEQ ID NO: 1485, SEQ ID NO: 1486, SEQ ID NO: 1487, SEQ ID NO: 1488, SEQ ID NO: 1489, SEQ ID NO: 1490, SEQ ID NO: 1491, SEQ ID NO: 1492, SEQ ID NO: 1493, SEQ ID NO: 1494, SEQ ID NO: 1495, SEQ ID NO: 1496, SEQ ID NO: 1497, SEQ ID NO: 1498, SEQ ID NO: 1499, SEQ ID NO: 1500, SEQ ID NO: 1501, SEQ ID NO: 1502, SEQ ID NO: 1503, SEQ ID NO: 1504, SEQ ID NO: 1505, SEQ ID NO: 1506, SEQ ID NO: 1507, SEQ ID NO: 1508, SEQ ID NO: 1509, SEQ ID NO: 1510, SEQ ID NO: 1511, SEQ ID NO: 1512, SEQ ID NO: 1513, SEQ ID NO: 1514, SEQ ID NO: 1515, SEQ ID NO: 1516, SEQ ID NO: 1517, SEQ ID NO: 1518, SEQ ID NO: 1519, SEQ ID NO: 1520, SEQ ID NO: 1521, SEQ ID NO: 1522, SEQ ID NO: 1523, SEQ ID NO: 1524, SEQ ID NO: 1525, SEQ ID NO: 1526, SEQ ID NO: 1527, SEQ ID NO: 1528, SEQ ID NO: 1529, SEQ ID NO: 1530, SEQ ID NO: 1531, SEQ ID NO: 1532, SEQ ID NO: 1533, SEQ ID NO: 1534, SEQ ID NO: 1535, SEQ ID NO: 1536, SEQ ID NO: 1537, SEQ ID NO: 1538, SEQ ID NO: 1539, SEQ ID NO: 1540, SEQ ID NO: 1541, SEQ ID NO: 1542, SEQ ID NO: 1543, SEQ ID NO: 1544, SEQ ID NO: 1545, SEQ ID NO: 1546, SEQ ID NO: 1547, SEQ ID NO: 1548, SEQ ID NO: 1549, SEQ ID NO: 1550, SEQ ID NO: 1551, SEQ ID NO: 1552, SEQ ID NO: 1553, SEQ ID NO: 1554, SEQ ID NO: 1555, SEQ ID NO: 1556, SEQ ID NO: 1557, SEQ ID NO: 1558, SEQ ID NO: 1559, SEQ ID NO: 1560, SEQ ID NO: 1561, SEQ ID NO: 1562, SEQ ID NO: 1563, SEQ ID NO: 1564, SEQ ID NO: 1565, SEQ ID NO: 1566, SEQ ID NO: 1567, SEQ ID NO: 1568, SEQ ID NO: 1569, SEQ ID NO: 1570, SEQ ID NO: 1571, SEQ ID NO: 1572, SEQ ID NO: 1573, SEQ ID NO: 1574, SEQ ID NO: 1575, SEQ ID NO: 1576, SEQ ID NO: 1577, SEQ ID NO: 1578, SEQ ID NO: 1579, SEQ ID NO: 1580, SEQ ID NO: 1581, SEQ ID NO: 1582, SEQ ID NO: 1583, SEQ ID NO: 1584, SEQ ID NO: 1585, SEQ ID NO: 1586, SEQ ID NO: 1587, SEQ ID NO: 1588, SEQ ID NO: 1589, SEQ ID NO: 1590, SEQ ID NO: 1591, SEQ ID NO: 1592, SEQ ID NO: 1593, SEQ ID NO: 1594, SEQ ID NO: 1595, SEQ ID NO: 1596, SEQ ID NO: 1597, SEQ ID NO: 1598, SEQ ID NO: 1599, SEQ ID NO: 1600, SEQ ID NO: 1601, SEQ ID NO: 1602, SEQ ID NO: 1603, SEQ ID NO: 1604, SEQ ID NO: 1605, SEQ ID NO: 1606, SEQ ID NO: 1607, SEQ ID NO: 1608, SEQ ID NO: 1609, SEQ ID NO: 1610, SEQ ID NO: 1611, SEQ ID NO: 1612, SEQ ID NO: 1613, SEQ ID NO: 1614, SEQ ID NO: 1615, SEQ ID NO: 1616, SEQ ID NO: 1617, SEQ ID NO: 1618, SEQ ID NO: 1619, SEQ ID NO: 1620, SEQ ID NO: 1621, SEQ ID NO: 1622, SEQ ID NO: 1623, SEQ ID NO: 1624, SEQ ID NO: 1625, SEQ ID NO: 1626, SEQ ID NO: 1627, SEQ ID NO: 1628, SEQ ID NO: 1629, SEQ ID NO: 1630, SEQ ID NO: 1631, SEQ ID NO: 1632, SEQ ID NO: 1633, SEQ ID NO: 1634, SEQ ID NO: 1635, SEQ ID NO: 1636, SEQ ID NO: 1637, SEQ ID NO: 1638, SEQ ID NO: 1639, SEQ ID NO: 1640, SEQ ID NO: 1641, SEQ ID NO: 1642, SEQ ID NO: 1643, SEQ ID NO: 1644, SEQ ID NO: 1645, SEQ ID NO: 1646, SEQ ID NO: 1647, SEQ ID NO: 1648, SEQ ID NO: 1649, SEQ ID NO: 1650, SEQ ID NO: 1651, SEQ ID NO: 1652, SEQ ID NO: 1653, SEQ ID NO: 1654, SEQ ID NO: 1655, SEQ ID NO: 1656, SEQ ID NO: 1657, SEQ ID NO: 1658, SEQ ID NO: 1659, SEQ ID NO: 1660, SEQ ID NO: 1661, SEQ ID NO: 1662, SEQ ID NO: 1663, SEQ ID NO: 1664, SEQ ID NO: 1665, SEQ ID NO: 1666, SEQ ID NO: 1667, SEQ ID NO: 1668, SEQ ID NO: 1669, SEQ ID NO: 1670, SEQ ID NO: 1671, SEQ ID NO: 1672, SEQ ID NO: 1673, SEQ ID NO: 1674, SEQ ID NO: 1675, SEQ ID NO: 1676, SEQ ID NO: 1677, SEQ ID NO: 1678, SEQ ID NO: 1679, SEQ ID NO: 1680, SEQ ID NO: 1681, SEQ ID NO: 1682, SEQ ID NO: 1683, SEQ ID NO: 1684, SEQ ID NO: 1685, SEQ ID NO: 1686, SEQ ID NO: 1687, SEQ ID NO: 1688, SEQ ID NO: 1689, SEQ ID NO: 1690, SEQ ID NO: 1691, SEQ ID NO: 1692, SEQ ID NO: 1693, SEQ ID NO: 1694, SEQ ID NO: 1695, SEQ ID NO: 1696, SEQ ID NO: 1697, SEQ ID NO: 1698, SEQ ID NO: 1699, SEQ ID NO: 1700, SEQ ID NO: 1701, SEQ ID NO: 1702, SEQ ID NO: 1703, SEQ ID NO: 1704, SEQ ID NO: 1705, SEQ ID NO: 1706, SEQ ID NO: 1707, SEQ ID NO: 1708, SEQ ID NO: 1709, SEQ ID NO: 1710, SEQ ID NO: 1711, SEQ ID NO: 1712, SEQ ID NO: 1713, SEQ ID NO: 1714, SEQ ID NO: 1715, SEQ ID NO: 1716, SEQ ID NO: 1717, SEQ ID NO: 1718, SEQ ID NO: 1719, SEQ ID NO: 1720, SEQ ID NO: 1721, SEQ ID NO: 1722, SEQ ID NO: 1723, SEQ ID NO: 1724, SEQ ID NO: 1725, SEQ ID NO: 1726, SEQ ID NO: 1727, SEQ ID NO: 1728, SEQ ID NO: 1729, SEQ ID NO: 1730, SEQ ID NO: 1731, SEQ ID NO: 1732, SEQ ID NO: 1733, SEQ ID NO: 1734, SEQ ID NO: 1735, SEQ ID NO: 1736, SEQ ID NO: 1737, SEQ ID NO: 1738, SEQ ID NO: 1739, SEQ ID NO: 1740, SEQ ID NO: 1741, SEQ ID NO: 1742, SEQ ID NO: 1743, SEQ ID NO: 1744, SEQ ID NO: 1745, SEQ ID NO: 1746, SEQ ID NO: 1747, SEQ ID NO: 1748, SEQ ID NO: 1749, SEQ ID NO: 1750, SEQ ID NO: 1751, SEQ ID NO: 1752, SEQ ID NO: 1753, SEQ ID NO: 1754, SEQ ID NO: 1755, SEQ ID NO: 1756, SEQ ID NO: 1757, SEQ ID NO: 1758, SEQ ID NO: 1759, SEQ ID NO: 1760, SEQ ID NO: 1761, SEQ ID NO: 1762, SEQ ID NO: 1763, SEQ ID NO: 1764, SEQ ID NO: 1765, SEQ ID NO: 1766, SEQ ID NO: 1767, SEQ ID NO: 1768, SEQ ID NO: 1769, SEQ ID NO: 1770, SEQ ID NO: 1771, SEQ ID NO: 1772, SEQ ID NO: 1773, SEQ ID NO: 1774, SEQ ID NO: 1775, SEQ ID NO: 1776, SEQ ID NO: 1777, SEQ ID NO: 1778, SEQ ID NO: 1779, SEQ ID NO: 1780, SEQ ID NO: 1781, SEQ ID NO: 1782, SEQ ID NO: 1783, SEQ ID NO: 1784, SEQ ID NO: 1785, SEQ ID NO: 1786, SEQ ID NO: 1787, SEQ ID NO: 1788, SEQ ID NO: 1789, SEQ ID NO: 1790, SEQ ID NO: 1791, SEQ ID NO: 1792, SEQ ID NO: 1793, SEQ ID NO: 1794, SEQ ID NO: 1795, SEQ ID NO: 1796, SEQ ID NO: 1797, SEQ ID NO: 1798, SEQ ID NO: 1799, SEQ ID NO: 1800, SEQ ID NO: 1801, SEQ ID NO: 1802, SEQ ID NO: 1803, SEQ ID NO: 1804, SEQ ID NO: 1805, SEQ ID NO: 1806, SEQ ID NO: 1807, SEQ ID NO: 1808, SEQ ID NO: 1809, SEQ ID NO: 1810, SEQ ID NO: 1811, SEQ ID NO: 1812, SEQ ID NO: 1813, SEQ ID NO: 1814, SEQ ID NO: 1815, SEQ ID NO: 1816, SEQ ID NO: 1817, SEQ ID NO: 1818, SEQ ID NO: 1819, SEQ ID NO: 1820, SEQ ID NO: 1821, SEQ ID NO: 1822, SEQ ID NO: 1823, SEQ ID NO: 1824, SEQ ID NO: 1825, SEQ ID NO: 1826, SEQ ID NO: 1827, SEQ ID NO: 1828, SEQ ID NO: 1829, SEQ ID NO: 1830, SEQ ID NO: 1831, SEQ ID NO: 1832, SEQ ID NO: 1833, SEQ ID NO: 1834, SEQ ID NO: 1835, SEQ ID NO: 1836, SEQ ID NO: 1837, SEQ ID NO: 1838, SEQ ID NO: 1839, SEQ ID NO: 1840, SEQ ID NO: 1841, SEQ ID NO: 1842, SEQ ID NO: 1843, SEQ ID NO: 1844, SEQ ID NO: 1845, SEQ ID NO: 1846, SEQ ID NO: 1847, SEQ ID NO: 1848, SEQ ID NO: 1849, SEQ ID NO: 1850, SEQ ID NO: 1851, SEQ ID NO: 1852, SEQ ID NO: 1853, SEQ ID NO: 1854, SEQ ID NO: 1855, SEQ ID NO: 1856, SEQ ID NO: 1857, SEQ ID NO: 1858, SEQ ID NO: 1859, SEQ ID NO: 1860, SEQ ID NO: 1861, SEQ ID NO: 1862, SEQ ID NO: 1863, SEQ ID NO: 1864, SEQ ID NO: 1865, SEQ ID NO: 1866, SEQ ID NO: 1867, SEQ ID NO: 1868, SEQ ID NO: 1869, SEQ ID NO: 1870, SEQ ID NO: 1871, SEQ ID NO: 1872, SEQ ID NO: 1873, SEQ ID NO: 1874, SEQ ID NO: 1875, SEQ ID NO: 1876, SEQ ID NO: 1877, SEQ ID NO: 1878, SEQ ID NO: 1879, SEQ ID NO: 1880, SEQ ID NO: 1881, SEQ ID NO: 1882, SEQ ID NO: 1883, SEQ ID NO: 1884, SEQ ID NO: 1885, SEQ ID NO: 1886, SEQ ID NO: 1887, SEQ ID NO: 1888, SEQ ID NO: 1889, SEQ ID NO: 1890, SEQ ID NO: 1891, SEQ ID NO: 1892, SEQ ID NO: 1893, SEQ ID NO: 1894, SEQ ID NO: 1895, SEQ ID NO: 1896, SEQ ID NO: 1897, SEQ ID NO: 1898, SEQ ID NO: 1899, SEQ ID NO: 1900, SEQ ID NO: 1901, SEQ ID NO: 1902, SEQ ID NO: 1903, SEQ ID NO: 1904, SEQ ID NO: 1905, SEQ ID NO: 1906, SEQ ID NO: 1907, SEQ ID NO: 1908, SEQ ID NO: 1909, SEQ ID NO: 1910, SEQ ID NO: 1911, SEQ ID NO: 1912, SEQ ID NO: 1913, SEQ ID NO: 1914, SEQ ID NO: 1915, SEQ ID NO: 1916, SEQ ID NO: 1917, SEQ ID NO: 1918, SEQ ID NO: 1919, SEQ ID NO: 1920, SEQ ID NO: 1957, SEQ ID NO: 1958, SEQ ID NO: 1959, SEQ ID NO: 1960, SEQ ID NO: 1961, SEQ ID NO: 1962, SEQ ID NO: 1963, SEQ ID NO: 1964, SEQ ID NO: 1965, SEQ ID NO: 1966, SEQ ID NO: 1967, SEQ ID NO: 1968, SEQ ID NO: 1969, SEQ ID NO: 1970, SEQ ID NO: 1971, SEQ ID NO: 1972, SEQ ID NO: 1973, SEQ ID NO: 1974, SEQ ID NO: 1975, SEQ ID NO: 1976, SEQ ID NO: 1977, SEQ ID NO: 1978, SEQ ID NO: 1979, SEQ ID NO: 1980, SEQ ID NO: 1981, SEQ ID NO: 1982, SEQ ID NO: 1983, SEQ ID NO: 1984, SEQ ID NO: 1985, SEQ ID NO: 1986, SEQ ID NO: 1987, SEQ ID NO: 1988, SEQ ID NO: 1989, SEQ ID NO: 1990, SEQ ID NO: 1991, SEQ ID NO: 1992, SEQ ID NO: 1993, SEQ ID NO: 1994, SEQ ID NO: 1995, SEQ ID NO: 1996, SEQ ID NO: 1997, SEQ ID NO: 1998, SEQ ID NO: 1999, SEQ ID NO: 2000, SEQ ID NO: 2001, SEQ ID NO: 2002, SEQ ID NO: 2003, SEQ ID NO: 2004, SEQ ID NO: 2005, SEQ ID NO: 2006, SEQ ID NO: 2007, SEQ ID NO: 2008, SEQ ID NO: 2009, SEQ ID NO: 2010, SEQ ID NO: 2011, SEQ ID NO: 2012, SEQ ID NO: 2013, SEQ ID NO: 2014, SEQ ID NO: 2015, SEQ ID NO: 2016, SEQ ID NO: 2017, SEQ ID NO: 2018, SEQ ID NO: 2019, SEQ ID NO: 2020, SEQ ID NO: 2021, SEQ ID NO: 2022, SEQ ID NO: 2023, SEQ ID NO: 2024, SEQ ID NO: 2025, SEQ ID NO: 2026, SEQ ID NO: 2027, SEQ ID NO: 2028, SEQ ID NO: 2029, SEQ ID NO: 2030, SEQ ID NO: 2031, SEQ ID NO: 2032, SEQ ID NO: 2033, SEQ ID NO: 2034, SEQ ID NO: 2035, SEQ ID NO: 2036, SEQ ID NO: 2037, SEQ ID NO: 2038, SEQ ID NO: 2039, SEQ ID NO: 2040, SEQ ID NO: 2041, SEQ ID NO: 2042, SEQ ID NO: 2043, SEQ ID NO: 2044, SEQ ID NO: 2045, SEQ ID NO: 2046, SEQ ID NO: 2047, SEQ ID NO: 2048, SEQ ID NO: 2049, SEQ ID NO: 2050, SEQ ID NO: 2051, SEQ ID NO: 2052, SEQ ID NO: 2053, SEQ ID NO: 2054, SEQ ID NO: 2055, SEQ ID NO: 2056, SEQ ID NO: 2057, SEQ ID NO: 2058, SEQ ID NO: 2059, SEQ ID NO: 2060, SEQ ID NO: 2061, SEQ ID NO: 2062, SEQ ID NO: 2063, SEQ ID NO: 2064, SEQ ID NO: 2065, SEQ ID NO: 2066, SEQ ID NO: 2067, SEQ ID NO: 2068, SEQ ID NO: 2069, SEQ ID NO: 2070, SEQ ID NO: 2071, SEQ ID NO: 2072, SEQ ID NO: 2073, SEQ ID NO: 2074, SEQ ID NO: 2075, SEQ ID NO: 2076, SEQ ID NO: 2077, SEQ ID NO: 2078, SEQ ID NO: 2079, SEQ ID NO: 2080, SEQ ID NO: 2081, SEQ ID NO: 2082, SEQ ID NO: 2083, SEQ ID NO: 2084, SEQ ID NO: 2085, SEQ ID NO: 2086, SEQ ID NO: 2087, SEQ ID NO: 2088, SEQ ID NO: 2089, SEQ ID NO: 2090, SEQ ID NO: 2091, SEQ ID NO: 2092, SEQ ID NO: 2093, SEQ ID NO: 2094, SEQ ID NO: 2095, SEQ ID NO: 2096, SEQ ID NO: 2097, SEQ ID NO: 2098, SEQ ID NO: 2099, SEQ ID NO: 2100, SEQ ID NO: 2101, SEQ ID NO: 2102, SEQ ID NO: 2103, SEQ ID NO: 2104, SEQ ID NO: 2105, SEQ ID NO: 2106, SEQ ID NO: 2107, SEQ ID NO: 2108, SEQ ID NO: 2109, SEQ ID NO: 2110, SEQ ID NO: 2111, SEQ ID NO: 2112, SEQ ID NO: 2113, SEQ ID NO: 2114, SEQ ID NO: 2115, SEQ ID NO: 2116, SEQ ID NO: 2117, SEQ ID NO: 2118, SEQ ID NO: 2119, SEQ ID NO: 2120, SEQ ID NO: 2121, SEQ ID NO: 2122, SEQ ID NO: 2123, SEQ ID NO: 2124, SEQ ID NO: 2125, SEQ ID NO: 2126, SEQ ID NO: 2127, SEQ ID NO: 2128, SEQ ID NO: 2129, SEQ ID NO: 2130, SEQ ID NO: 2131, SEQ ID NO: 2132, SEQ ID NO: 2133, SEQ ID NO: 2134, SEQ ID NO: 2135, SEQ ID NO: 2136, SEQ ID NO: 2137, SEQ ID NO: 2138, SEQ ID NO: 2139, SEQ ID NO: 2140, SEQ ID NO: 2141, SEQ ID NO: 2142, SEQ ID NO: 2143, SEQ ID NO: 2144, SEQ ID NO: 2145, SEQ ID NO: 2146, SEQ ID NO: 2147, SEQ ID NO: 2148, SEQ ID NO: 2149, SEQ ID NO: 2150, SEQ ID NO: 2151, SEQ ID NO: 2152, SEQ ID NO: 2153, SEQ ID NO: 2154, SEQ ID NO: 2155, SEQ ID NO: 2156, SEQ ID NO: 2157, SEQ ID NO: 2158, SEQ ID NO: 2159, SEQ ID NO: 2160, SEQ ID NO: 2161, SEQ ID NO: 2162, SEQ ID NO: 2163, SEQ ID NO: 2164, SEQ ID NO: 2165, SEQ ID NO: 2166, SEQ ID NO: 2167, SEQ ID NO: 2168, SEQ ID NO: 2169, SEQ ID NO: 2170, SEQ ID NO: 2171, SEQ ID NO: 2172, SEQ ID NO: 2173, SEQ ID NO: 2174, SEQ ID NO: 2175, SEQ ID NO: 2176, SEQ ID NO: 2177, SEQ ID NO: 2178, SEQ ID NO: 2179, SEQ ID NO: 2180, or SEQ ID NO: 2181, at least one CGI factor precursor, or at least one CGI factor fragment, (b) is a synthetic sequence of (a) that has codons optimized for heterologous expression; or (c) encodes at least one CGI factor motif. The nucleotide sequence encoding the at least one CGI factor of the preceding embodiment may include SEQ ID NO: 1, SEQ ID NO: 2, SEQ ID NO: 3, SEQ ID NO: 4, SEQ ID NO: 5, SEQ ID NO: 6, SEQ ID NO: 7, SEQ ID NO: 8, SEQ ID NO: 9, SEQ ID NO: 10, SEQ ID NO: 11, SEQ ID NO: 12, SEQ ID NO: 13, SEQ ID NO: 14, SEQ ID NO: 15, SEQ ID NO: 16, SEQ ID NO: 17, SEQ ID NO: 18, SEQ ID NO: 19, SEQ ID NO: 20, SEQ ID NO: 21, SEQ ID NO: 22, SEQ ID NO: 23, SEQ ID NO: 24, SEQ ID NO: 25, SEQ ID NO: 26, SEQ ID NO: 27, SEQ ID NO: 28, SEQ ID NO: 29, SEQ ID NO: 30, SEQ ID NO: 31, SEQ ID NO: 32, SEQ ID NO: 33, SEQ ID NO: 34, SEQ ID NO: 35, SEQ ID NO: 36, SEQ ID NO: 37, SEQ ID NO: 38, SEQ ID NO: 39, SEQ ID NO: 40, SEQ ID NO: 41, SEQ ID NO: 42, SEQ ID NO: 43, SEQ ID NO: 44, SEQ ID NO: 45, SEQ ID NO: 46, SEQ ID NO: 47, SEQ ID NO: 48, SEQ ID NO: 49, SEQ ID NO: 50, SEQ ID NO: 51, SEQ ID NO: 52, SEQ ID NO: 53, SEQ ID NO: 54, SEQ ID NO: 55, SEQ ID NO: 56, SEQ ID NO: 57, SEQ ID NO: 58, SEQ ID NO: 59, SEQ ID NO: 60, SEQ ID NO: 61, SEQ ID NO: 62, SEQ ID NO: 63, SEQ ID NO: 64, SEQ ID NO: 65, SEQ ID NO: 66, SEQ ID NO: 67, SEQ ID NO: 68, SEQ ID NO: 69, SEQ ID NO: 70, SEQ ID NO: 71, SEQ ID NO: 72, SEQ ID NO: 73, SEQ ID NO: 74, SEQ ID NO: 75, SEQ ID NO: 76, SEQ ID NO: 77, SEQ ID NO: 78, SEQ ID NO: 79, SEQ ID NO: 80, SEQ ID NO: 81, SEQ ID NO: 82, SEQ ID NO: 83, SEQ ID NO: 84, SEQ ID NO: 85, SEQ ID NO: 86, SEQ ID NO: 87, SEQ ID NO: 88, SEQ ID NO: 89, SEQ ID NO: 90, SEQ ID NO: 91, SEQ ID NO: 92, SEQ ID NO: 93, SEQ ID NO: 94, SEQ ID NO: 95, SEQ ID NO: 96, SEQ ID NO: 97, SEQ ID NO: 98, SEQ ID NO: 99, SEQ ID NO: 100, SEQ ID NO: 101, SEQ ID NO: 102, SEQ ID NO: 103, SEQ ID NO: 104, SEQ ID NO: 105, SEQ ID NO: 106, SEQ ID NO: 107, SEQ ID NO: 108, SEQ ID NO: 109, SEQ ID NO: 110, SEQ ID NO: 111, SEQ ID NO: 112, SEQ ID NO: 113, SEQ ID NO: 114, SEQ ID NO: 115, SEQ ID NO: 116, SEQ ID NO: 117, SEQ ID NO: 118, SEQ ID NO: 119, SEQ ID NO: 120, SEQ ID NO: 121, SEQ ID NO: 122, SEQ ID NO: 123, SEQ ID NO: 124, SEQ ID NO: 125, SEQ ID NO: 126, SEQ ID NO: 127, SEQ ID NO: 128, SEQ ID NO: 129, SEQ ID NO: 130, SEQ ID NO: 131, SEQ ID NO: 132, SEQ ID NO: 133, SEQ ID NO: 134, SEQ ID NO: 135, SEQ ID NO: 136, SEQ ID NO: 137, SEQ ID NO: 138, SEQ ID NO: 139, SEQ ID NO: 140, SEQ ID NO: 141, SEQ ID NO: 142, SEQ ID NO: 143, SEQ ID NO: 144, SEQ ID NO: 145, SEQ ID NO: 146, SEQ ID NO: 147, SEQ ID NO: 148, SEQ ID NO: 149, SEQ ID NO: 150, SEQ ID NO: 151, SEQ ID NO: 152, SEQ ID NO: 153, SEQ ID NO: 154, SEQ ID NO: 155, SEQ ID NO: 156, SEQ ID NO: 157, SEQ ID NO: 158, SEQ ID NO: 159, SEQ ID NO: 160, SEQ ID NO: 161, SEQ ID NO: 162, SEQ ID NO: 163, SEQ ID NO: 164, SEQ ID NO: 165, SEQ ID NO: 166, SEQ ID NO: 167, SEQ ID NO: 168, SEQ ID NO: 169, SEQ ID NO: 170, SEQ ID NO: 171, SEQ ID NO: 172, SEQ ID NO: 173, SEQ ID NO: 174, SEQ ID NO: 175, SEQ ID NO: 176, SEQ ID NO: 177, SEQ ID NO: 178, SEQ ID NO: 179, SEQ ID NO: 180, SEQ ID NO: 181, SEQ ID NO: 182, SEQ ID NO: 183, SEQ ID NO: 184, SEQ ID NO: 185, SEQ ID NO: 186, SEQ ID NO: 187, SEQ ID NO: 188, SEQ ID NO: 189, SEQ ID NO: 190, SEQ ID NO: 191, SEQ ID NO: 192, SEQ ID NO: 193, SEQ ID NO: 194, SEQ ID NO: 195, SEQ ID NO: 196, SEQ ID NO: 197, SEQ ID NO: 198, SEQ ID NO: 199, SEQ ID NO: 200, SEQ ID NO: 201, SEQ ID NO: 202, SEQ ID NO: 203, SEQ ID NO: 204, SEQ ID NO: 205, SEQ ID NO: 206, SEQ ID NO: 207, SEQ ID NO: 208, SEQ ID NO: 209, SEQ ID NO: 210, SEQ ID NO: 211, SEQ ID NO: 212, SEQ ID NO: 213, SEQ ID NO: 214, SEQ ID NO: 215, SEQ ID NO: 216, SEQ ID NO: 217, SEQ ID NO: 218, SEQ ID NO: 219, SEQ ID NO: 220, SEQ ID NO: 221, SEQ ID NO: 222, SEQ ID NO: 223, SEQ ID NO: 224, SEQ ID NO: 225, SEQ ID NO: 226, SEQ ID NO: 227, SEQ ID NO: 228, SEQ ID NO: 229, SEQ ID NO: 230, SEQ ID NO: 231, SEQ ID NO: 232, SEQ ID NO: 233, SEQ ID NO: 234, SEQ ID NO: 235, SEQ ID NO: 236, SEQ ID NO: 237, SEQ ID NO: 238, SEQ ID NO: 239, SEQ ID NO: 240, SEQ ID NO: 241, SEQ ID NO: 242, SEQ ID NO: 243, SEQ ID NO: 244, SEQ ID NO: 245, SEQ ID NO: 246, SEQ ID NO: 247, SEQ ID NO: 248, SEQ ID NO: 249, SEQ ID NO: 250, SEQ ID NO: 251, SEQ ID NO: 252, SEQ ID NO: 253, SEQ ID NO: 254, SEQ ID NO: 255, SEQ ID NO: 256, SEQ ID NO: 257, SEQ ID NO: 258, SEQ ID NO: 259, SEQ ID NO: 260, SEQ ID NO: 261, SEQ ID NO: 262, SEQ ID NO: 263, SEQ ID NO: 264, SEQ ID NO: 265, SEQ ID NO: 266, SEQ ID NO: 267, SEQ ID NO: 268, SEQ ID NO: 269, SEQ ID NO: 270, SEQ ID NO: 271, SEQ ID NO: 272, SEQ ID NO: 273, SEQ ID NO: 274, SEQ ID NO: 275, SEQ ID NO: 276, SEQ ID NO: 277, SEQ ID NO: 278, SEQ ID NO: 279, SEQ ID NO: 280, SEQ ID NO: 281, SEQ ID NO: 282, SEQ ID NO: 283, SEQ ID NO: 284, SEQ ID NO: 285, SEQ ID NO: 286, SEQ ID NO: 287, SEQ ID NO: 288, SEQ ID NO: 289, SEQ ID NO: 290, SEQ ID NO: 291, SEQ ID NO: 292, SEQ ID NO: 293, SEQ ID NO: 294, SEQ ID NO: 295, SEQ ID NO: 296, SEQ ID NO: 297, SEQ ID NO: 298, SEQ ID NO: 299, SEQ ID NO: 300, SEQ ID NO: 301, SEQ ID NO: 302, SEQ ID NO: 303, SEQ ID NO: 304, SEQ ID NO: 305, SEQ ID NO: 306, SEQ ID NO: 307, SEQ ID NO: 308, SEQ ID NO: 309, SEQ ID NO: 310, SEQ ID NO: 311, SEQ ID NO: 312, SEQ ID NO: 313, SEQ ID NO: 314, SEQ ID NO: 315, SEQ ID NO: 316, SEQ ID NO: 317, SEQ ID NO: 318, SEQ ID NO: 319, SEQ ID NO: 320, SEQ ID NO: 321, SEQ ID NO: 322, SEQ ID NO: 323, SEQ ID NO: 324, SEQ ID NO: 325, SEQ ID NO: 326, SEQ ID NO: 327, SEQ ID NO: 328, SEQ ID NO: 329, SEQ ID NO: 330, SEQ ID NO: 331, SEQ ID NO: 332, SEQ ID NO: 333, SEQ ID NO: 334, SEQ ID NO: 335, SEQ ID NO: 336, SEQ ID NO: 337, SEQ ID NO: 338, SEQ ID NO: 339, SEQ ID NO: 340, SEQ ID NO: 341, SEQ ID NO: 342, SEQ ID NO: 343, SEQ ID NO: 344, SEQ ID NO: 345, SEQ ID NO: 346, SEQ ID NO: 347, SEQ ID NO: 348, SEQ ID NO: 349, SEQ ID NO: 350, SEQ ID NO: 351, SEQ ID NO: 352, SEQ ID NO: 353, SEQ ID NO: 354, SEQ ID NO: 355, SEQ ID NO: 356, SEQ ID NO: 357, SEQ ID NO: 358, SEQ ID NO: 359, SEQ ID NO: 360, SEQ ID NO: 361, SEQ ID NO: 362, SEQ ID NO: 363, SEQ ID NO: 364, SEQ ID NO: 365, SEQ ID NO: 366, SEQ ID NO: 367, SEQ ID NO: 368, SEQ ID NO: 369, SEQ ID NO: 370, SEQ ID NO: 371, SEQ ID NO: 372, SEQ ID NO: 373, SEQ ID NO: 374, SEQ ID NO: 375, SEQ ID NO: 376, SEQ ID NO: 377, SEQ ID NO: 378, SEQ ID NO: 379, SEQ ID NO: 380, SEQ ID NO: 381, SEQ ID NO: 382, SEQ ID NO: 383, SEQ ID NO: 384, SEQ ID NO: 385, SEQ ID NO: 386, SEQ ID NO: 387, SEQ ID NO: 388, SEQ ID NO: 389, SEQ ID NO: 390, SEQ ID NO: 391, SEQ ID NO: 392, SEQ ID NO: 393, SEQ ID NO: 394, SEQ ID NO: 395, SEQ ID NO: 396, SEQ ID NO: 397, SEQ ID NO: 398, SEQ ID NO: 399, SEQ ID NO: 400, SEQ ID NO: 401, SEQ ID NO: 402, SEQ ID NO: 403, SEQ ID NO: 404, SEQ ID NO: 405, SEQ ID NO: 406, SEQ ID NO: 407, SEQ ID NO: 408, SEQ ID NO: 409, SEQ ID NO: 410, SEQ ID NO: 411, SEQ ID NO: 412, SEQ ID NO: 413, SEQ ID NO: 414, SEQ ID NO: 415, SEQ ID NO: 416, SEQ ID NO: 417, SEQ ID NO: 418, SEQ ID NO: 419, SEQ ID NO: 420, SEQ ID NO: 421, SEQ ID NO: 422, SEQ ID NO: 423, SEQ ID NO: 424, SEQ ID NO: 425, SEQ ID NO: 426, SEQ ID NO: 427, SEQ ID NO: 428, SEQ ID NO: 429, SEQ ID NO: 430, SEQ ID NO: 431, SEQ ID NO: 432, SEQ ID NO: 433, SEQ ID NO: 434, SEQ ID NO: 435, SEQ ID NO: 436, SEQ ID NO: 437, SEQ ID NO: 438, SEQ ID NO: 439, SEQ ID NO: 440, SEQ ID NO: 441, SEQ ID NO: 442, SEQ ID NO: 443, SEQ ID NO: 444, SEQ ID NO: 445, SEQ ID NO: 446, SEQ ID NO: 447, SEQ ID NO: 448, SEQ ID NO: 449, SEQ ID NO: 450, SEQ ID NO: 451, SEQ ID NO: 452, SEQ ID NO: 453, SEQ ID NO: 454, SEQ ID NO: 455, SEQ ID NO: 456, SEQ ID NO: 457, SEQ ID NO: 458, SEQ ID NO: 459, SEQ ID NO: 460, SEQ ID NO: 461, SEQ ID NO: 462, SEQ ID NO: 463, SEQ ID NO: 464, SEQ ID NO: 465, SEQ ID NO: 466, SEQ ID NO: 467, SEQ ID NO: 468, SEQ ID NO: 469, SEQ ID NO: 470, SEQ ID NO: 471, SEQ ID NO: 472, SEQ ID NO: 473, SEQ ID NO: 474, SEQ ID NO: 475, SEQ ID NO: 476, SEQ ID NO: 477, SEQ ID NO: 478, SEQ ID NO: 479, SEQ ID NO: 480, SEQ ID NO: 481, SEQ ID NO: 482, SEQ ID NO: 483, SEQ ID NO: 484, SEQ ID NO: 485, SEQ ID NO: 486, SEQ ID NO: 487, SEQ ID NO: 488, SEQ ID NO: 489, SEQ ID NO: 490, SEQ ID NO: 491, SEQ ID NO: 492, SEQ ID NO: 493, SEQ ID NO: 494, SEQ ID NO: 495, SEQ ID NO: 496, SEQ ID NO: 497, SEQ ID NO: 498, SEQ ID NO: 499, SEQ ID NO: 500, SEQ ID NO: 501, SEQ ID NO: 502, SEQ ID NO: 503, SEQ ID NO: 504, SEQ ID NO: 505, SEQ ID NO: 506, SEQ ID NO: 507, SEQ ID NO: 508, SEQ ID NO: 509, SEQ ID NO: 510, SEQ ID NO: 511, SEQ ID NO: 512, SEQ ID NO: 513, SEQ ID NO: 514, SEQ ID NO: 515, SEQ ID NO: 516, SEQ ID NO: 517, SEQ ID NO: 518, SEQ ID NO: 519, SEQ ID NO: 520, SEQ ID NO: 521, SEQ ID NO: 522, SEQ ID NO: 523, SEQ ID NO: 524, SEQ ID NO: 525, SEQ ID NO: 526, SEQ ID NO: 527, SEQ ID NO: 528, SEQ ID NO: 529, SEQ ID NO: 530, SEQ ID NO: 531, SEQ ID NO: 532, SEQ ID NO: 533, SEQ ID NO: 534, SEQ ID NO: 535, SEQ ID NO: 536, SEQ ID NO: 537, SEQ ID NO: 538, SEQ ID NO: 539, SEQ ID NO: 540, SEQ ID NO: 541, SEQ ID NO: 542, SEQ ID NO: 543, SEQ ID NO: 544, SEQ ID NO: 545, SEQ ID NO: 546, SEQ ID NO: 547, SEQ ID NO: 548, SEQ ID NO: 549, SEQ ID NO: 550, SEQ ID NO: 551, SEQ ID NO: 552, SEQ ID NO: 553, SEQ ID NO: 554, SEQ ID NO: 555, SEQ ID NO: 556, SEQ ID NO: 557, SEQ ID NO: 558, SEQ ID NO: 559, SEQ ID NO: 560, SEQ ID NO: 561, SEQ ID NO: 562, SEQ ID NO: 563, SEQ ID NO: 564, SEQ ID NO: 565, SEQ ID NO: 566, SEQ ID NO: 567, SEQ ID NO: 568, SEQ ID NO: 569, SEQ ID NO: 570, SEQ ID NO: 571, SEQ ID NO: 572, SEQ ID NO: 573, SEQ ID NO: 574, SEQ ID NO: 575, SEQ ID NO: 576, SEQ ID NO: 577, SEQ ID NO: 578, SEQ ID NO: 579, SEQ ID NO: 580, SEQ ID NO: 581, SEQ ID NO: 582, SEQ ID NO: 583, SEQ ID NO: 584, SEQ ID NO: 585, SEQ ID NO: 586, SEQ ID NO: 587, SEQ ID NO: 588, SEQ ID NO: 589, SEQ ID NO: 590, SEQ ID NO: 591, SEQ ID NO: 592, SEQ ID NO: 593, SEQ ID NO: 594, SEQ ID NO: 595, SEQ ID NO: 596, SEQ ID NO: 597, SEQ ID NO: 598, SEQ ID NO: 599, SEQ ID NO: 600, SEQ ID NO: 601, SEQ ID NO: 602, SEQ ID NO: 603, SEQ ID NO: 604, SEQ ID NO: 605, SEQ ID NO: 606, SEQ ID NO: 607, SEQ ID NO: 608, SEQ ID NO: 609, SEQ ID NO: 610, SEQ ID NO: 611, SEQ ID NO: 612, SEQ ID NO: 613, SEQ ID NO: 614, SEQ ID NO: 615, SEQ ID NO: 616, SEQ ID NO: 617, SEQ ID NO: 618, SEQ ID NO: 619, SEQ ID NO: 620, SEQ ID NO: 621, SEQ ID NO: 622, SEQ ID NO: 623, SEQ ID NO: 624, SEQ ID NO: 625, SEQ ID NO: 626, SEQ ID NO: 627, SEQ ID NO: 628, SEQ ID NO: 629, SEQ ID NO: 630, SEQ ID NO: 631, SEQ ID NO: 632, SEQ ID NO: 633, SEQ ID NO: 634, SEQ ID NO: 635, SEQ ID NO: 636, SEQ ID NO: 637, SEQ ID NO: 638, SEQ ID NO: 639, SEQ ID NO: 640, SEQ ID NO: 641, SEQ ID NO: 642, SEQ ID NO: 643, SEQ ID NO: 644, SEQ ID NO: 645, SEQ ID NO: 646, SEQ ID NO: 647, SEQ ID NO: 648, SEQ ID NO: 649, SEQ ID NO: 650, SEQ ID NO: 651, SEQ ID NO: 652, SEQ ID NO: 653, SEQ ID NO: 654, SEQ ID NO: 655, SEQ ID NO: 656, SEQ ID NO: 657, SEQ ID NO: 658, SEQ ID NO: 659, SEQ ID NO: 660, SEQ ID NO: 661, SEQ ID NO: 662, SEQ ID NO: 663, SEQ ID NO: 664, SEQ ID NO: 665, SEQ ID NO: 666, SEQ ID NO: 667, SEQ ID NO: 668, SEQ ID NO: 669, SEQ ID NO: 670, SEQ ID NO: 671, SEQ ID NO: 672, SEQ ID NO: 673, SEQ ID NO: 674, SEQ ID NO: 675, SEQ ID NO: 676, SEQ ID NO: 677, SEQ ID NO: 678, SEQ ID NO: 679, SEQ ID NO: 680, SEQ ID NO: 681, SEQ ID NO: 682, SEQ ID NO: 683, SEQ ID NO: 684, SEQ ID NO: 685, SEQ ID NO: 686, SEQ ID NO: 687, SEQ ID NO: 688, SEQ ID NO: 689, SEQ ID NO: 690, SEQ ID NO: 691, SEQ ID NO: 692, SEQ ID NO: 693, SEQ ID NO: 694, SEQ ID NO: 695, SEQ ID NO: 696, SEQ ID NO: 697, SEQ ID NO: 698, SEQ ID NO: 699, SEQ ID NO: 700, SEQ ID NO: 701, SEQ ID NO: 702, SEQ ID NO: 703, SEQ ID NO: 704, SEQ ID NO: 705, SEQ ID NO: 706, SEQ ID NO: 707, SEQ ID NO: 708, SEQ ID NO: 709, SEQ ID NO: 710, SEQ ID NO: 711, SEQ ID NO: 712, SEQ ID NO: 713, SEQ ID NO: 714, SEQ ID NO: 715, SEQ ID NO: 716, SEQ ID NO: 717, SEQ ID NO: 718, SEQ ID NO: 719, SEQ ID NO: 720, SEQ ID NO: 721, SEQ ID NO: 722, SEQ ID NO: 723, SEQ ID NO: 724, SEQ ID NO: 725, SEQ ID NO: 726, SEQ ID NO: 727, SEQ ID NO: 728, SEQ ID NO: 729, SEQ ID NO: 730, SEQ ID NO: 731, SEQ ID NO: 732, SEQ ID NO: 733, SEQ ID NO: 734, SEQ ID NO: 735, SEQ ID NO: 736, SEQ ID NO: 737, SEQ ID NO: 738, SEQ ID NO: 739, SEQ ID NO: 740, SEQ ID NO: 741, SEQ ID NO: 742, SEQ ID NO: 743, SEQ ID NO: 744, SEQ ID NO: 745, SEQ ID NO: 746, SEQ ID NO: 747, SEQ ID NO: 748, SEQ ID NO: 749, SEQ ID NO: 750, SEQ ID NO: 751, SEQ ID NO: 752, SEQ ID NO: 753, SEQ ID NO: 754, SEQ ID NO: 755, SEQ ID NO: 756, SEQ ID NO: 757, SEQ ID NO: 758, SEQ ID NO: 759, SEQ ID NO: 760, SEQ ID NO: 761, SEQ ID NO: 762, SEQ ID NO: 763, SEQ ID NO: 764, SEQ ID NO: 765, SEQ ID NO: 766, SEQ ID NO: 767, SEQ ID NO: 768, SEQ ID NO: 769, SEQ ID NO: 770, SEQ ID NO: 771, SEQ ID NO: 772, SEQ ID NO: 773, SEQ ID NO: 774, SEQ ID NO: 775, SEQ ID NO: 776, SEQ ID NO: 777, SEQ ID NO: 778, SEQ ID NO: 779, SEQ ID NO: 780, SEQ ID NO: 781, SEQ ID NO: 782, SEQ ID NO: 783, SEQ ID NO: 784, SEQ ID NO: 785, SEQ ID NO: 786, SEQ ID NO: 787, SEQ ID NO: 788, SEQ ID NO: 789, SEQ ID NO: 790, SEQ ID NO: 791, SEQ ID NO: 792, SEQ ID NO: 793, SEQ ID NO: 794, SEQ ID NO: 795, SEQ ID NO: 796, SEQ ID NO: 797, SEQ ID NO: 798, SEQ ID NO: 799, SEQ ID NO: 800, SEQ ID NO: 801, SEQ ID NO: 802, SEQ ID NO: 803, SEQ ID NO: 804, SEQ ID NO: 805, SEQ ID NO: 806, SEQ ID NO: 807, SEQ ID NO: 808, SEQ ID NO: 809, SEQ ID NO: 810, SEQ ID NO: 811, SEQ ID NO: 812, SEQ ID NO: 813, SEQ ID NO: 814, SEQ ID NO: 815, SEQ ID NO: 816, SEQ ID NO: 817, SEQ ID NO: 818, SEQ ID NO: 819, SEQ ID NO: 820, SEQ ID NO: 821, SEQ ID NO: 822, SEQ ID NO: 823, SEQ ID NO: 824, SEQ ID NO: 825, SEQ ID NO: 826, SEQ ID NO: 827, SEQ ID NO: 828, SEQ ID NO: 829, SEQ ID NO: 830, SEQ ID NO: 831, SEQ ID NO: 832, SEQ ID NO: 833, SEQ ID NO: 834, SEQ ID NO: 835, SEQ ID NO: 836, SEQ ID NO: 837, SEQ ID NO: 838, SEQ ID NO: 839, SEQ ID NO: 840, SEQ ID NO: 841, SEQ ID NO: 842, SEQ ID NO: 843, SEQ ID NO: 844, SEQ ID NO: 845, SEQ ID NO: 846, SEQ ID NO: 847, SEQ ID NO: 848, SEQ ID NO: 849, SEQ ID NO: 850, SEQ ID NO: 851, SEQ ID NO: 852, SEQ ID NO: 853, SEQ ID NO: 854, SEQ ID NO: 855, SEQ ID NO: 856, SEQ ID NO: 857, SEQ ID NO: 858, SEQ ID NO: 859, SEQ ID NO: 860, SEQ ID NO: 861, SEQ ID NO: 862, SEQ ID NO: 863, SEQ ID NO: 864, SEQ ID NO: 865, SEQ ID NO: 866, SEQ ID NO: 867, SEQ ID NO: 868, SEQ ID NO: 869, SEQ ID NO: 870, SEQ ID NO: 871, SEQ ID NO: 872, SEQ ID NO: 873, SEQ ID NO: 874, SEQ ID NO: 875, SEQ ID NO: 876, SEQ ID NO: 877, SEQ ID NO: 878, SEQ ID NO: 879, SEQ ID NO: 880, SEQ ID NO: 881, SEQ ID NO: 882, SEQ ID NO: 883, SEQ ID NO: 884, SEQ ID NO: 885, SEQ ID NO: 886, SEQ ID NO: 887, SEQ ID NO: 888, SEQ ID NO: 889, SEQ ID NO: 890, SEQ ID NO: 891, SEQ ID NO: 892, SEQ ID NO: 893, SEQ ID NO: 894, SEQ ID NO: 895, SEQ ID NO: 896, SEQ ID NO: 897, SEQ ID NO: 898, SEQ ID NO: 899, SEQ ID NO: 900, SEQ ID NO: 901, SEQ ID NO: 902, SEQ ID NO: 903, SEQ ID NO: 904, SEQ ID NO: 905, SEQ ID NO: 906, SEQ ID NO: 907, SEQ ID NO: 908, SEQ ID NO: 909, SEQ ID NO: 910, SEQ ID NO: 911, SEQ ID NO: 912, SEQ ID NO: 913, SEQ ID NO: 914, SEQ ID NO: 915, SEQ ID NO: 916, SEQ ID NO: 917, SEQ ID NO: 918, SEQ ID NO: 919, SEQ ID NO: 920, SEQ ID NO: 921, SEQ ID NO: 922, SEQ ID NO: 923, SEQ ID NO: 924, SEQ ID NO: 925, SEQ ID NO: 926, SEQ ID NO: 927, SEQ ID NO: 928, SEQ ID NO: 929, SEQ ID NO: 930, SEQ ID NO: 931, SEQ ID NO: 932, SEQ ID NO: 933, SEQ ID NO: 934, SEQ ID NO: 935, SEQ ID NO: 936, SEQ ID NO: 937, SEQ ID NO: 938, SEQ ID NO: 939, SEQ ID NO: 940, SEQ ID NO: 941, SEQ ID NO: 942, SEQ ID NO: 943, SEQ ID NO: 944, SEQ ID NO: 945, SEQ ID NO: 946, SEQ ID NO: 947, SEQ ID NO: 948, SEQ ID NO: 949, SEQ ID NO: 950, SEQ ID NO: 951, SEQ ID NO: 952, SEQ ID NO: 953, SEQ ID NO: 954, SEQ ID NO: 955, SEQ ID NO: 956, SEQ ID NO: 957, SEQ ID NO: 958, SEQ ID NO: 959, SEQ ID NO: 960, or SEQ ID NOs: 3362-5698. In additional embodiments of this aspect, the CGI factor may include SEQ ID NO: 2182, SEQ ID NO: 2183, SEQ ID NO: 2184, SEQ ID NO: 2185, SEQ ID NO: 2186, SEQ ID NO: 2187, SEQ ID NO: 2188, SEQ ID NO: 2189, SEQ ID NO: 2194, SEQ ID NO: 2195, SEQ ID NO: 2196, SEQ ID NO: 2197, SEQ ID NO: 2198, SEQ ID NO: 2199, SEQ ID NO: 2200, SEQ ID NO: 2201, SEQ ID NO: 2202, SEQ ID NO: 2203, SEQ ID NO: 2204, SEQ ID NO: 2205, SEQ ID NO: 2206, SEQ ID NO: 2207, SEQ ID NO: 2208, SEQ ID NO: 2209, SEQ ID NO: 2210, SEQ ID NO: 2215, SEQ ID NO: 2216, SEQ ID NO: 2217, SEQ ID NO: 2218, SEQ ID NO: 2219, SEQ ID NO: 2220, SEQ ID NO: 2221, SEQ ID NO: 2222, SEQ ID NO: 2223, SEQ ID NO: 2224, SEQ ID NO: 2225, SEQ ID NO: 2226, SEQ ID NO: 2227, SEQ ID NO: 2228, SEQ ID NO: 2229, SEQ ID NO: 2230, SEQ ID NO: 2231, SEQ ID NO: 2232, SEQ ID NO: 2233, SEQ ID NO: 2234, SEQ ID NO: 2235, SEQ ID NO: 2236, SEQ ID NO: 2237, SEQ ID NO: 2238, SEQ ID NO: 2239, SEQ ID NO: 2240, SEQ ID NO: 2241, SEQ ID NO: 2242, or SEQ ID NO: 2243. In some embodiments of this aspect, the CGI factor motif includes at least one of SEQ ID NO: 1921, SEQ ID NO: 1922, SEQ ID NO: 1923, SEQ ID NO: 1924, SEQ ID NO: 1925, SEQ ID NO: 1926, SEQ ID NO: 1927, SEQ ID NO: 1928, SEQ ID NO: 1929, SEQ ID NO: 1930, SEQ ID NO: 1931, SEQ ID NO: 1932, SEQ ID NO: 1933, SEQ ID NO: 1934, SEQ ID NO: 1935, SEQ ID NO: 1936, SEQ ID NO: 1937, SEQ ID NO: 1938, SEQ ID NO: 1939, SEQ ID NO: 1940, SEQ ID NO: 1941, SEQ ID NO: 1942, SEQ ID NO: 1943, SEQ ID NO: 1944, SEQ ID NO: 1945, SEQ ID NO: 1946, SEQ ID NO: 1947, SEQ ID NO: 1948, SEQ ID NO: 1949, SEQ ID NO: 1950, SEQ ID NO: 1951, SEQ ID NO: 1952, SEQ ID NO: 1953, SEQ ID NO: 1954, SEQ ID NO: 1955, or SEQ ID NO: 1956. In still further embodiments of this aspect, the CGI factor may include SEQ ID NO: 2457, SEQ ID NO: 2458, SEQ ID NO: 2459, SEQ ID NO: 2460, SEQ ID NO: 2461, SEQ ID NO: 2462, SEQ ID NO: 2463, SEQ ID NO: 2464, SEQ ID NO: 2465, SEQ ID NO: 2466, SEQ ID NO: 2467, SEQ ID NO: 2468, SEQ ID NO: 2469, SEQ ID NO: 2470, SEQ ID NO: 2471, SEQ ID NO: 2472, SEQ ID NO: 2473, SEQ ID NO: 2474, SEQ ID NO: 2475, SEQ ID NO: 2476, SEQ ID NO: 2477, SEQ ID NO: 2478, SEQ ID NO: 2479, SEQ ID NO: 2480, SEQ ID NO: 2481, SEQ ID NO: 2482, SEQ ID NO: 2483, SEQ ID NO: 2484, SEQ ID NO: 2485, SEQ ID NO: 2486, SEQ ID NO: 2487, SEQ ID NO: 2488, SEQ ID NO: 2489, SEQ ID NO: 2490, SEQ ID NO: 2491, SEQ ID NO: 2492, SEQ ID NO: 2493, SEQ ID NO: 2494, SEQ ID NO: 2495, SEQ ID NO: 2496, SEQ ID NO: 2497, SEQ ID NO: 2498, SEQ ID NO: 2499, SEQ ID NO: 2500, SEQ ID NO: 2501, SEQ ID NO: 2502, SEQ ID NO: 2503, SEQ ID NO: 2504, SEQ ID NO: 2505, SEQ ID NO: 2506, SEQ ID NO: 2507, SEQ ID NO: 2508, SEQ ID NO: 2509, SEQ ID NO: 2510, SEQ ID NO: 2511, SEQ ID NO: 2512, SEQ ID NO: 2513, SEQ ID NO: 2514, SEQ ID NO: 2515, SEQ ID NO: 2516, SEQ ID NO: 2517, SEQ ID NO: 2518, SEQ ID NO: 2519, SEQ ID NO: 2520, SEQ ID NO: 2521, SEQ ID NO: 2522, SEQ ID NO: 2523, SEQ ID NO: 2524, SEQ ID NO: 2525, SEQ ID NO: 2526, SEQ ID NO: 2527, SEQ ID NO: 2528, SEQ ID NO: 2529, SEQ ID NO: 2530, SEQ ID NO: 2531, SEQ ID NO: 2532, SEQ ID NO: 2533, SEQ ID NO: 2534, SEQ ID NO: 2535, SEQ ID NO: 2536, SEQ ID NO: 2537, SEQ ID NO: 2538, SEQ ID NO: 2539, SEQ ID NO: 2540, SEQ ID NO: 2541, SEQ ID NO: 2542, SEQ ID NO: 2543, SEQ ID NO: 2544, SEQ ID NO: 2545, SEQ ID NO: 2546, SEQ ID NO: 2547, SEQ ID NO: 2548, SEQ ID NO: 2549, SEQ ID NO: 2550, SEQ ID NO: 2551, SEQ ID NO: 2552, SEQ ID NO: 2553, SEQ ID NO: 2554, SEQ ID NO: 2555, SEQ ID NO: 2556, SEQ ID NO: 2557, SEQ ID NO: 2558, SEQ ID NO: 2559, SEQ ID NO: 2560, SEQ ID NO: 2561, SEQ ID NO: 2562, SEQ ID NO: 2563, SEQ ID NO: 2564, SEQ ID NO: 2565, SEQ ID NO: 2566, SEQ ID NO: 2567, SEQ ID NO: 2568, SEQ ID NO: 2569, SEQ ID NO: 2570, SEQ ID NO: 2571, SEQ ID NO: 2572, SEQ ID NO: 2573, SEQ ID NO: 2574, SEQ ID NO: 2575, SEQ ID NO: 2576, SEQ ID NO: 2577, SEQ ID NO: 2578, SEQ ID NO: 2579, SEQ ID NO: 2580, SEQ ID NO: 2581, SEQ ID NO: 2582, SEQ ID NO: 2583, SEQ ID NO: 2584, SEQ ID NO: 2585, SEQ ID NO: 2586, SEQ ID NO: 2587, SEQ ID NO: 2588, SEQ ID NO: 2589, SEQ ID NO: 2590, SEQ ID NO: 2591, SEQ ID NO: 2592, SEQ ID NO: 2593, SEQ ID NO: 2594, SEQ ID NO: 2595, SEQ ID NO: 2596, SEQ ID NO: 2597, SEQ ID NO: 2598, SEQ ID NO: 2599, SEQ ID NO: 2600, SEQ ID NO: 2601, SEQ ID NO: 2602, SEQ ID NO: 2603, SEQ ID NO: 2604, SEQ ID NO: 2605, SEQ ID NO: 2606, SEQ ID NO: 2607, SEQ ID NO: 2608, SEQ ID NO: 2609, SEQ ID NO: 2610, SEQ ID NO: 2611, SEQ ID NO: 2612, SEQ ID NO: 2613, SEQ ID NO: 2614, SEQ ID NO: 2615, SEQ ID NO: 2616, SEQ ID NO: 2617, SEQ ID NO: 2618, SEQ ID NO: 2619, SEQ ID NO: 2620, SEQ ID NO: 2621, SEQ ID NO: 2622, SEQ ID NO: 2623, SEQ ID NO: 2624, SEQ ID NO: 2625, SEQ ID NO: 2626, SEQ ID NO: 2627, SEQ ID NO: 2628, SEQ ID NO: 2629, SEQ ID NO: 2630, SEQ ID NO: 2631, SEQ ID NO: 2632, SEQ ID NO: 2633, SEQ ID NO: 2634, SEQ ID NO: 2635, SEQ ID NO: 2636, SEQ ID NO: 2637, SEQ ID NO: 2638, SEQ ID NO: 2639, SEQ ID NO: 2640, SEQ ID NO: 2641, SEQ ID NO: 2642, SEQ ID NO: 2643, SEQ ID NO: 2644, SEQ ID NO: 2645, SEQ ID NO: 2646, SEQ ID NO: 2647, SEQ ID NO: 2648, SEQ ID NO: 2649, SEQ ID NO: 2650, SEQ ID NO: 2651, SEQ ID NO: 2652, SEQ ID NO: 2653, SEQ ID NO: 2654, SEQ ID NO: 2655, SEQ ID NO: 2656, SEQ ID NO: 2657, SEQ ID NO: 2658, SEQ ID NO: 2659, SEQ ID NO: 2660, SEQ ID NO: 2661, SEQ ID NO: 2662, SEQ ID NO: 2663, SEQ ID NO: 2664, SEQ ID NO: 2665, SEQ ID NO: 2666, SEQ ID NO: 2667, SEQ ID NO: 2668, SEQ ID NO: 2669, SEQ ID NO: 2670, SEQ ID NO: 2671, SEQ ID NO: 2672, SEQ ID NO: 2673, SEQ ID NO: 2674, SEQ ID NO: 2675, SEQ ID NO: 2676, SEQ ID NO: 2677, SEQ ID NO: 2678, SEQ ID NO: 2679, SEQ ID NO: 2680, SEQ ID NO: 2681, SEQ ID NO: 2682, SEQ ID NO: 2683, SEQ ID NO: 2684, SEQ ID NO: 2685, SEQ ID NO: 2686, SEQ ID NO: 2687, SEQ ID NO: 2688, SEQ ID NO: 2689, SEQ ID NO: 2690, SEQ ID NO: 2691, SEQ ID NO: 2692, SEQ ID NO: 2693, SEQ ID NO: 2694, SEQ ID NO: 2695, SEQ ID NO: 2696, SEQ ID NO: 2697, SEQ ID NO: 2698, SEQ ID NO: 2699, SEQ ID NO: 2700, SEQ ID NO: 2701, SEQ ID NO: 2702, SEQ ID NO: 2703, SEQ ID NO: 2704, SEQ ID NO: 2705, SEQ ID NO: 2706, SEQ ID NO: 2707, SEQ ID NO: 2708, SEQ ID NO: 2709, SEQ ID NO: 2710, SEQ ID NO: 2711, SEQ ID NO: 2712, SEQ ID NO: 2713, SEQ ID NO: 2714, SEQ ID NO: 2715, SEQ ID NO: 2716, SEQ ID NO: 2717, SEQ ID NO: 2718, SEQ ID NO: 2719, SEQ ID NO: 2720, SEQ ID NO: 2721, SEQ ID NO: 2722, SEQ ID NO: 2723, SEQ ID NO: 2724, SEQ ID NO: 2725, SEQ ID NO: 2726, SEQ ID NO: 2727, SEQ ID NO: 2728, SEQ ID NO: 2729, SEQ ID NO: 2730, SEQ ID NO: 2731, SEQ ID NO: 2732, SEQ ID NO: 2733, SEQ ID NO: 2734, SEQ ID NO: 2735, SEQ ID NO: 2736, SEQ ID NO: 2737, SEQ ID NO: 2738, SEQ ID NO: 2739, SEQ ID NO: 2740, SEQ ID NO: 2741, SEQ ID NO: 2742, SEQ ID NO: 2743, SEQ ID NO: 2744, SEQ ID NO: 2745, SEQ ID NO: 2746, SEQ ID NO: 2747, SEQ ID NO: 2748, SEQ ID NO: 2749, SEQ ID NO: 2750, SEQ ID NO: 2751, SEQ ID NO: 2752, SEQ ID NO: 2753, SEQ ID NO: 2754, SEQ ID NO: 2755, SEQ ID NO: 2756, SEQ ID NO: 2757, SEQ ID NO: 2758, SEQ ID NO: 2759, SEQ ID NO: 2760, SEQ ID NO: 2761, SEQ ID NO: 2762, SEQ ID NO: 2763, SEQ ID NO: 2764, SEQ ID NO: 2765, SEQ ID NO: 2766, SEQ ID NO: 2767, SEQ ID NO: 2768, SEQ ID NO: 2769, SEQ ID NO: 2770, SEQ ID NO: 2771, SEQ ID NO: 2772, SEQ ID NO: 2773, SEQ ID NO: 2774, SEQ ID NO: 2775, SEQ ID NO: 2776, SEQ ID NO: 2777, SEQ ID NO: 2778, SEQ ID NO: 2779, SEQ ID NO: 2780, SEQ ID NO: 2781, SEQ ID NO: 2782, SEQ ID NO: 2783, SEQ ID NO: 2784, SEQ ID NO: 2785, SEQ ID NO: 2786, SEQ ID NO: 2787, SEQ ID NO: 2788, SEQ ID NO: 2789, SEQ ID NO: 2790, SEQ ID NO: 2791, SEQ ID NO: 2792, SEQ ID NO: 2793, SEQ ID NO: 2794, SEQ ID NO: 2795, SEQ ID NO: 2796, SEQ ID NO: 2797, SEQ ID NO: 2798, SEQ ID NO: 2799, SEQ ID NO: 2800, SEQ ID NO: 2801, SEQ ID NO: 2802, SEQ ID NO: 2803, SEQ ID NO: 2804, SEQ ID NO: 2805, SEQ ID NO: 2806, SEQ ID NO: 2807, SEQ ID NO: 2808, SEQ ID NO: 2809, SEQ ID NO: 2810, SEQ ID NO: 2811, SEQ ID NO: 2812, SEQ ID NO: 2813, SEQ ID NO: 2814, SEQ ID NO: 2815, SEQ ID NO: 2816, SEQ ID NO: 2817, SEQ ID NO: 2818, SEQ ID NO: 2819, SEQ ID NO: 2820, SEQ ID NO: 2821, SEQ ID NO: 2822, SEQ ID NO: 2823, SEQ ID NO: 2824, SEQ ID NO: 2825, SEQ ID NO: 2826, SEQ ID NO: 2827, SEQ ID NO: 2828, SEQ ID NO: 2829, SEQ ID NO: 2830, SEQ ID NO: 2831, SEQ ID NO: 2832, SEQ ID NO: 2833, SEQ ID NO: 2834, SEQ ID NO: 2835, SEQ ID NO: 2836, SEQ ID NO: 2837, SEQ ID NO: 2838, SEQ ID NO: 2839, SEQ ID NO: 2840, SEQ ID NO: 2841, SEQ ID NO: 2842, SEQ ID NO: 2843, SEQ ID NO: 2844, SEQ ID NO: 2845, SEQ ID NO: 2846, SEQ ID NO: 2847, SEQ ID NO: 2848, SEQ ID NO: 2849, SEQ ID NO: 2850, SEQ ID NO: 2851, SEQ ID NO: 2852, SEQ ID NO: 2853, SEQ ID NO: 2854, SEQ ID NO: 2855, SEQ ID NO: 2856, SEQ ID NO: 2857, SEQ ID NO: 2858, SEQ ID NO: 2859, SEQ ID NO: 2860, SEQ ID NO: 2861, SEQ ID NO: 2862, SEQ ID NO: 2863, SEQ ID NO: 2864, SEQ ID NO: 2865, SEQ ID NO: 2866, SEQ ID NO: 2867, SEQ ID NO: 2868, SEQ ID NO: 2869, SEQ ID NO: 2870, SEQ ID NO: 2871, SEQ ID NO: 2872, SEQ ID NO: 2873, SEQ ID NO: 2874, SEQ ID NO: 2875, SEQ ID NO: 2876, SEQ ID NO: 2877, SEQ ID NO: 2878, SEQ ID NO: 2879, SEQ ID NO: 2880, SEQ ID NO: 2881, SEQ ID NO: 2882, SEQ ID NO: 2883, SEQ ID NO: 2884, SEQ ID NO: 2885, SEQ ID NO: 2886, SEQ ID NO: 2887, SEQ ID NO: 2888, SEQ ID NO: 2889, SEQ ID NO: 2890, SEQ ID NO: 2891, SEQ ID NO: 2892, SEQ ID NO: 2893, SEQ ID NO: 2894, SEQ ID NO: 2895, SEQ ID NO: 2896, SEQ ID NO: 2897, SEQ ID NO: 2898, SEQ ID NO: 2899, SEQ ID NO: 2900, SEQ ID NO: 2901, SEQ ID NO: 2902, SEQ ID NO: 2903, SEQ ID NO: 2904, SEQ ID NO: 2905, SEQ ID NO: 2906, SEQ ID NO: 2907, SEQ ID NO: 2908, SEQ ID NO: 2909, SEQ ID NO: 2910, SEQ ID NO: 2911, SEQ ID NO: 2912, SEQ ID NO: 2913, SEQ ID NO: 2914, SEQ ID NO: 2915, SEQ ID NO: 2916, SEQ ID NO: 2917, SEQ ID NO: 2918, SEQ ID NO: 2919, SEQ ID NO: 2920, SEQ ID NO: 2921, SEQ ID NO: 2922, SEQ ID NO: 2923, SEQ ID NO: 2924, SEQ ID NO: 2925, SEQ ID NO: 2926, SEQ ID NO: 2927, SEQ ID NO: 2928, SEQ ID NO: 2929, SEQ ID NO: 2930, SEQ ID NO: 2931, SEQ ID NO: 2932, SEQ ID NO: 2933, SEQ ID NO: 2934, SEQ ID NO: 2935, SEQ ID NO: 2936, SEQ ID NO: 2937, SEQ ID NO: 2938, SEQ ID NO: 2939, SEQ ID NO: 2940, SEQ ID NO: 2941, SEQ ID NO: 2942, SEQ ID NO: 2943, SEQ ID NO: 2944, SEQ ID NO: 2945, SEQ ID NO: 2946, SEQ ID NO: 2947, SEQ ID NO: 2948, SEQ ID NO: 2949, SEQ ID NO: 2950, SEQ ID NO: 2951, SEQ ID NO: 2952, SEQ ID NO: 2953, SEQ ID NO: 2954, SEQ ID NO: 2955, SEQ ID NO: 2956, SEQ ID NO: 2957, SEQ ID NO: 2958, SEQ ID NO: 2959, SEQ ID NO: 2960, SEQ ID NO: 2961, SEQ ID NO: 2962, SEQ ID NO: 2963, SEQ ID NO: 2964, SEQ ID NO: 2965, SEQ ID NO: 2966, SEQ ID NO: 2967, SEQ ID NO: 2968, SEQ ID NO: 2969, SEQ ID NO: 2970, SEQ ID NO: 2971, SEQ ID NO: 2972, SEQ ID NO: 2973, SEQ ID NO: 2974, SEQ ID NO: 2975, SEQ ID NO: 2976, SEQ ID NO: 2977, SEQ ID NO: 2978, SEQ ID NO: 2979, SEQ ID NO: 2980, SEQ ID NO: 2981, SEQ ID NO: 2982, SEQ ID NO: 2983, SEQ ID NO: 2984, SEQ ID NO: 2985, SEQ ID NO: 2986, SEQ ID NO: 2987, SEQ ID NO: 2988, SEQ ID NO: 2989, SEQ ID NO: 2990, SEQ ID NO: 2991, SEQ ID NO: 2992, SEQ ID NO: 2993, SEQ ID NO: 2994, SEQ ID NO: 2995, SEQ ID NO: 2996, SEQ ID NO: 2997, SEQ ID NO: 2998, SEQ ID NO: 2999, SEQ ID NO: 3000, SEQ ID NO: 3001, SEQ ID NO: 3002, SEQ ID NO: 3003, SEQ ID NO: 3004, SEQ ID NO: 3005, SEQ ID NO: 3006, SEQ ID NO: 3007, SEQ ID NO: 3008, SEQ ID NO: 3009, SEQ ID NO: 3010, SEQ ID NO: 3011, SEQ ID NO: 3012, SEQ ID NO: 3013, SEQ ID NO: 3014, SEQ ID NO: 3015, SEQ ID NO: 3016, SEQ ID NO: 3017, SEQ ID NO: 3018, SEQ ID NO: 3019, SEQ ID NO: 3020, SEQ ID NO: 3021, SEQ ID NO: 3022, SEQ ID NO: 3023, SEQ ID NO: 3024, SEQ ID NO: 3025, SEQ ID NO: 3026, SEQ ID NO: 3027, SEQ ID NO: 3028, SEQ ID NO: 3029, SEQ ID NO: 3030, SEQ ID NO: 3031, SEQ ID NO: 3032, SEQ ID NO: 3033, SEQ ID NO: 3034, SEQ ID NO: 3035, SEQ ID NO: 3036, SEQ ID NO: 3037, SEQ ID NO: 3038, SEQ ID NO: 3039, SEQ ID NO: 3040, SEQ ID NO: 3041, SEQ ID NO: 3042, SEQ ID NO: 3043, SEQ ID NO: 3044, SEQ ID NO: 3045, SEQ ID NO: 3046, SEQ ID NO: 3047, SEQ ID NO: 3048, SEQ ID NO: 3049, SEQ ID NO: 3050, SEQ ID NO: 3051, SEQ ID NO: 3052, SEQ ID NO: 3053, SEQ ID NO: 3054, SEQ ID NO: 3055, SEQ ID NO: 3056, SEQ ID NO: 3057, SEQ ID NO: 3058, SEQ ID NO: 3059, SEQ ID NO: 3060, SEQ ID NO: 3061, SEQ ID NO: 3062, SEQ ID NO: 3063, SEQ ID NO: 3064, SEQ ID NO: 3065, SEQ ID NO: 3066, SEQ ID NO: 3067, SEQ ID NO: 3068, SEQ ID NO: 3069, SEQ ID NO: 3070, SEQ ID NO: 3071, SEQ ID NO: 3072, SEQ ID NO: 3073, SEQ ID NO: 3074, SEQ ID NO: 3075, SEQ ID NO: 3076, SEQ ID NO: 3077, SEQ ID NO: 3078, SEQ ID NO: 3079, SEQ ID NO: 3080, SEQ ID NO: 3081, SEQ ID NO: 3082, SEQ ID NO: 3083, SEQ ID NO: 3084, SEQ ID NO: 3085, SEQ ID NO: 3086, SEQ ID NO: 3087, SEQ ID NO: 3088, SEQ ID NO: 3089, SEQ ID NO: 3090, SEQ ID NO: 3091, SEQ ID NO: 3092, SEQ ID NO: 3093, SEQ ID NO: 3094, SEQ ID NO: 3095, SEQ ID NO: 3096, SEQ ID NO: 3097, SEQ ID NO: 3098, SEQ ID NO: 3099, SEQ ID NO: 3100, SEQ ID NO: 3101, SEQ ID NO: 3102, SEQ ID NO: 3103, SEQ ID NO: 3104, SEQ ID NO: 3105, SEQ ID NO: 3106, SEQ ID NO: 3107, SEQ ID NO: 3108, SEQ ID NO: 3109, SEQ ID NO: 3110, SEQ ID NO: 3111, SEQ ID NO: 3112, SEQ ID NO: 3113, SEQ ID NO: 3114, SEQ ID NO: 3115, SEQ ID NO: 3116, SEQ ID NO: 3117, SEQ ID NO: 3118, SEQ ID NO: 3119, SEQ ID NO: 3120, SEQ ID NO: 3121, SEQ ID NO: 3122, SEQ ID NO: 3123, SEQ ID NO: 3124, SEQ ID NO: 3125, SEQ ID NO: 3126, SEQ ID NO: 3127, SEQ ID NO: 3128, SEQ ID NO: 3129, SEQ ID NO: 3130, SEQ ID NO: 3131, SEQ ID NO: 3132, SEQ ID NO: 3133, SEQ ID NO: 3134, SEQ ID NO: 3135, SEQ ID NO: 3136, SEQ ID NO: 3137, SEQ ID NO: 3138, SEQ ID NO: 3139, SEQ ID NO: 3140, SEQ ID NO: 3141, SEQ ID NO: 3142, SEQ ID NO: 3143, SEQ ID NO: 3144, SEQ ID NO: 3145, SEQ ID NO: 3146, SEQ ID NO: 3147, SEQ ID NO: 3148, SEQ ID NO: 3149, SEQ ID NO: 3150, SEQ ID NO: 3151, SEQ ID NO: 3152, SEQ ID NO: 3153, SEQ ID NO: 3154, SEQ ID NO: 3155, SEQ ID NO: 3156, SEQ ID NO: 3157, SEQ ID NO: 3158, SEQ ID NO: 3159, SEQ ID NO: 3160, SEQ ID NO: 3161, SEQ ID NO: 3162, SEQ ID NO: 3163, SEQ ID NO: 3164, SEQ ID NO: 3165, SEQ ID NO: 3166, SEQ ID NO: 3167, SEQ ID NO: 3168, SEQ ID NO: 3169, SEQ ID NO: 3170, SEQ ID NO: 3171, SEQ ID NO: 3172, SEQ ID NO: 3173, SEQ ID NO: 3174, SEQ ID NO: 3175, SEQ ID NO: 3176, SEQ ID NO: 3177, SEQ ID NO: 3178, SEQ ID NO: 3179, SEQ ID NO: 3180, SEQ ID NO: 3181, SEQ ID NO: 3182, SEQ ID NO: 3183, SEQ ID NO: 3184, SEQ ID NO: 3185, SEQ ID NO: 3186, SEQ ID NO: 3187, SEQ ID NO: 3188, SEQ ID NO: 3189, SEQ ID NO: 3190, SEQ ID NO: 3191, SEQ ID NO: 3192, SEQ ID NO: 3193, SEQ ID NO: 3194, SEQ ID NO: 3195, SEQ ID NO: 3196, SEQ ID NO: 3197, SEQ ID NO: 3198, SEQ ID NO: 3199, SEQ ID NO: 3200, SEQ ID NO: 3201, SEQ ID NO: 3202, SEQ ID NO: 3203, SEQ ID NO: 3204, SEQ ID NO: 3205, SEQ ID NO: 3206, SEQ ID NO: 3207, SEQ ID NO: 3208, SEQ ID NO: 3209, SEQ ID NO: 3210, SEQ ID NO: 3211, SEQ ID NO: 3212, SEQ ID NO: 3213, SEQ ID NO: 3214, SEQ ID NO: 3215, SEQ ID NO: 3216, SEQ ID NO: 3217, SEQ ID NO: 3218, SEQ ID NO: 3219, SEQ ID NO: 3220, SEQ ID NO: 3221, SEQ ID NO: 3222, SEQ ID NO: 3223, SEQ ID NO: 3224, SEQ ID NO: 3225, SEQ ID NO: 3226, SEQ ID NO: 3227, SEQ ID NO: 3228, SEQ ID NO: 3229, SEQ ID NO: 3230, SEQ ID NO: 3231, SEQ ID NO: 3232, SEQ ID NO: 3233, SEQ ID NO: 3234, SEQ ID NO: 3235, SEQ ID NO: 3236, SEQ ID NO: 3237, SEQ ID NO: 3238, SEQ ID NO: 3239, SEQ ID NO: 3240, SEQ ID NO: 3241, SEQ ID NO: 3242, SEQ ID NO: 3243, SEQ ID NO: 3244, SEQ ID NO: 3245, SEQ ID NO: 3246, SEQ ID NO: 3247, SEQ ID NO: 3248, SEQ ID NO: 3249, SEQ ID NO: 3250, SEQ ID NO: 3251, SEQ ID NO: 3252, SEQ ID NO: 3253, SEQ ID NO: 3254, SEQ ID NO: 3255, SEQ ID NO: 3256, SEQ ID NO: 3257, SEQ ID NO: 3258, SEQ ID NO: 3259, SEQ ID NO: 3260, SEQ ID NO: 3261, SEQ ID NO: 3262, SEQ ID NO: 3263, SEQ ID NO: 3264, SEQ ID NO: 3265, SEQ ID NO: 3266, SEQ ID NO: 3267, SEQ ID NO: 3268, SEQ ID NO: 3269, SEQ ID NO: 3270, SEQ ID NO: 3271, SEQ ID NO: 3272, SEQ ID NO: 3273, SEQ ID NO: 3274, SEQ ID NO: 3275, SEQ ID NO: 3276, SEQ ID NO: 3277, SEQ ID NO: 3278, SEQ ID NO: 3279, SEQ ID NO: 3280, SEQ ID NO: 3281, SEQ ID NO: 3282, SEQ ID NO: 3283, SEQ ID NO: 3284, SEQ ID NO: 3285, SEQ ID NO: 3286, SEQ ID NO: 3287, SEQ ID NO: 3288, SEQ ID NO: 3289, SEQ ID NO: 3290, SEQ ID NO: 3291, SEQ ID NO: 3292, SEQ ID NO: 3293, SEQ ID NO: 3294, SEQ ID NO: 3295, SEQ ID NO: 3296, SEQ ID NO: 3297, SEQ ID NO: 3298, SEQ ID NO: 3299, SEQ ID NO: 3300, SEQ ID NO: 3301, SEQ ID NO: 3302, SEQ ID NO: 3303, SEQ ID NO: 3304, SEQ ID NO: 3305, SEQ ID NO: 3306, SEQ ID NO: 3307, SEQ ID NO: 3308, SEQ ID NO: 3309, SEQ ID NO: 3310, SEQ ID NO: 3311, SEQ ID NO: 3312, SEQ ID NO: 3313, SEQ ID NO: 3314, SEQ ID NO: 3315, SEQ ID NO: 3316, SEQ ID NO: 3317, SEQ ID NO: 3318, SEQ ID NO: 3319, SEQ ID NO: 3320, SEQ ID NO: 3321, SEQ ID NO: 3322, SEQ ID NO: 3323, SEQ ID NO: 3324, SEQ ID NO: 3325, SEQ ID NO: 3326, SEQ ID NO: 3327, SEQ ID NO: 3328, SEQ ID NO: 3329, SEQ ID NO: 3330, SEQ ID NO: 3331, SEQ ID NO: 3332, SEQ ID NO: 3333, SEQ ID NO: 3334, SEQ ID NO: 3335, SEQ ID NO: 3336, SEQ ID NO: 3337, SEQ ID NO: 3338, SEQ ID NO: 3339, SEQ ID NO: 3340, SEQ ID NO: 3341, SEQ ID NO: 3342, SEQ ID NO: 3343, SEQ ID NO: 3344, SEQ ID NO: 3345, SEQ ID NO: 3346, SEQ ID NO: 3347, SEQ ID NO: 3348, SEQ ID NO: 3349, SEQ ID NO: 3350, SEQ ID NO: 3351, SEQ ID NO: 3352, SEQ ID NO: 3353, SEQ ID NO: 3354, SEQ ID NO: 3355, SEQ ID NO: 3356, SEQ ID NO: 3357, SEQ ID NO: 3358, SEQ ID NO: 3359, SEQ ID NO: 3360, or SEQ ID NO: 3361. In yet additional embodiments of this aspect, the CGI factor may include SEQ ID NO: 5707, SEQ ID NO: 5708, SEQ ID NO: 5709, SEQ ID NO: 5710, SEQ ID NO: 5711, SEQ ID NO: 5712, SEQ ID NO: 5713, SEQ ID NO: 5714, SEQ ID NO: 5715, SEQ ID NO: 5716, SEQ ID NO: 5717, SEQ ID NO: 5718, SEQ ID NO: 5719, SEQ ID NO: 5720, SEQ ID NO: 5721, SEQ ID NO: 5722, SEQ ID NO: 5723, SEQ ID NO: 5724, SEQ ID NO: 5725, SEQ ID NO: 5726, SEQ ID NO: 5727, SEQ ID NO: 5728, SEQ ID NO: 5729, SEQ ID NO: 5730, or SEQ ID NO: 5731. In further embodiments of this aspect, which may be combined with any preceding embodiment, the CGI factor, CGI factor precursor, or CGI factor fragment is active and/or toxic. In additional embodiments of this aspect, which may be combined with any preceding embodiment, the recombinant DNA construct includes (a) at least one copy of a CGI factor, (b) at least one copy each of two or more CGI factors, (c) at least one CGI factor precursor, (d) at least one CGI factor fragment, (e) at least one CGI factor motif, or (f) any combination of (a) to (e). In still further embodiments of this aspect, which may be combined with any preceding embodiment, the heterologous promoter is a bacterial promoter, a fungal promoter, an algal promoter, an animal promoter, or a plant promoter. In yet additional embodiments of this aspect, which may be combined with any preceding embodiment, the heterologous promoter is a plant expressible promoter, i.e., a promoter that is functional for driving expression in a plant cell. In some embodiments of this aspect, the plant expressible promoter is selected from the group of promoters of a ubiquitin promoter, a cestrum yellow virus promoter, a corn TrpA promoter, a OsMADS 6 promoter, a maize H3 histone promoter, a corn sucrose synthetase 1 promoter, a corn alcohol dehydrogenase 1 promoter, a corn heat shock protein promoter, a maize mtl promoter, a pea small subunit RuBP carboxylase promoter, a rice actin promoter, a rice cyclophilin promoter, a Ti plasmid mannopine synthase promoter, a Ti plasmid nopaline synthase promoter, a petunia chalcone isomerase promoter, a bean glycine rich protein 1 promoter, a potato patatin promoter, a lectin promoter, a CaMV 35S promoter, or a S-E9 small subunit RuBP carboxylase promoter. In some embodiments, the heterologous promoter is an inducible promoter, a tissue-specific promoter, a temporally specific promoter, or a developmentally specific promoter. Tissue-specific promoters are useful for limiting expression of the recombinant DNA construct and encoded CGI factor, CGI factor precursor, CGI factor fragment, or CGI factor motif to specific tissues (e.g., root, leaf, tuber, fruit, or seed) of a plant. In some embodiments, the heterologous promoter is a plant miRNA promoter, which can be inducible, tissue-specific, temporally specific, or developmentally specific; see, e.g., the tissue-specific promoters disclosed in U.S. Pat. No. 8,334,430 and the temporally specific promoters disclosed in U.S. Pat. No. 8,314,290. In some embodiments, the recombinant DNA construct includes further elements that are useful for expression control, such as expression-enhancing elements, transcript-stabilizing sequences, riboswitches, or recognition sites for miRNAs or siRNAs. For example, including a recognition site for a miRNA that is natively expressed in a specific tissue of a plant is expected to reduce or eliminate expression of the CGI factor, CGI factor precursor, CGI factor fragment, or CGI factor motif in that specific tissue. In additional embodiments of this aspect, the recombinant DNA construct further includes a nucleotide sequence encoding at least one secretion signal peptide functional in a cell. Still another aspect of the disclosure relates to a recombinant vector including the recombinant DNA construct of any one of the preceding embodiments. In some embodiments of this aspect, the vector includes a left T-DNA border and a right T-DNA border flanking the recombinant DNA construct. In some embodiments, the vector further comprises additional sequences flanking the recombinant DNA construct. The additional sequences may correspond to selectable markers, transposon ends, homologous arms, restriction sites, or other sequences suitable for downstream uses of the vector. In additional embodiments of this aspect, the vector is a bacterial, viral, or viroid vector.

[0026] A further aspect of the disclosure relates to an RNA transcript (e.g., a messenger RNA) resulting from the transcription of the recombinant DNA construct of any one of the preceding embodiments.

[0027] An additional aspect of the disclosure relates to a CGI factor, a CGI factor precursor, a CGI factor fragment, or a CGI factor motif encoded by the recombinant DNA construct of any one of the preceding embodiments.

### Transgenic Cells and Organisms

[0028] Yet another aspect of the disclosure relates to a transgenic cell including the recombinant vector of any one of the preceding claims. In further embodiments of this aspect, the cell is selected from a bacterial cell, a fungal cell, an algal cell, an animal cell, or a plant cell. In additional embodiments of this aspect, the transgenic cell is a plant cell. In some embodiments of this aspect, the plant cell is a dicot plant cell. In further embodiments of this aspect, the dicot plant cell is selected from the group of a soybean cell, a sunflower cell, a tomato cell, a potato cell, a Brassica spp. cell, a cotton cell, a sugar beet cell, or a tobacco cell. In additional embodiments of this aspect, the plant cell is a monocot plant cell. In further embodiments of this aspect, the monocot plant cell is selected from the group of a barley cell, a maize cell, an oat cell, a rice cell, a sorghum cell, a sugar cane cell, or a wheat cell. In yet another embodiment of this aspect, which may be combined with any of the preceding embodiments that has a transgenic cell, the CGI factor, the CGI factor precursor, the CGI factor fragment, or the CGI factor motif is (a) transiently expressed, or (b) stably expressed.

[0029] An additional aspect of the disclosure relates to a transgenic plant including the transgenic plant cell of any of the preceding embodiments. In some embodiments, the transgenic plant is chimeric, having some cells that are transgenic (e.g., expressing a recombinant DNA construct as disclosed herein) and some cells that are not transgenic. Related embodiments include a grafted plant, wherein the rootstock is transgenic (e.g., expressing a recombinant DNA construct as disclosed herein) and the grafted scion is not transgenic; or wherein the rootstock is not transgenic and the scion is transgenic. In embodiments, the modified genome is the nuclear genome of the plant; in other embodiments, the modified genome is the genome of the plant's chloroplasts or mitochondria. In some embodiments of this aspect, the transgenic plant is a dicot plant. In further embodiments of this aspect, the dicot plant is selected from the group of a soybean plant, a sunflower plant, a tomato plant, a Brassica spp. plant, a cotton plant, a sugar beet plant, or a tobacco plant. In additional embodiments of this aspect, the transgenic plant is a monocot plant. In further embodiments of this aspect, the monocot plant is selected from the group of a barley plant, a maize plant, an oat plant, a rice plant, a sorghum plant, a sugar cane plant, or a wheat plant. In yet another embodiment of this aspect, the plant has improved resistance to the fungal pathogen, in comparison to a control plant that does not include the transgenic plant cell. In still another embodiment of this aspect, the fungal pathogen is one of an Aspergillus species; Magnaporthe oryzae; Botrytis cinerea; a Puccinia species; Fusarium graminearum; Fusarium oxysporum; Blumeria graminis; Mycosphaerella graminicola; a Colletotrichum species; Ustilago maydis; Melampsora lini, Phakopsora pachyrhizi, or Rhizoctonia solani. In another embodiment of this aspect, which may be combined with any of the preceding embodiments, the nucleotide sequence encoding the CGI factor, the CGI factor precursor, the CGI factor fragment, or the CGI factor motif does not occur in the genome of the fungal pathogen.

[0030] Plants and plant cells are of any species of interest, including dicots and monocots. Plants of interest include row crop plants, fruit-producing plants and trees, vegetables, trees, and ornamental plants including ornamental flowers, shrubs, trees, groundcovers, and turf grasses. Examples of commercially important cultivated crops, trees, and plants include: alfalfa (Medicago sativa), almonds (Prunus dulcis), apples (Malus x domestica), apricots (Prunus armeniaca, P. brigantine, P. mandshurica, P. mume, P. sibirica), artichoke (Cynara cardunculus var. scolymus), asparagus (Asparagus officinalis), avocado (Persea americana), bananas (Musa spp.), barley (Hordeum vulgare), beans (Phaseolus spp.), blueberries and cranberries (Vaccinium spp.), Brazil nut (Bertholletia excelsa), cacao (Theobroma cacao), calamansi (Citrus x microcarpa), canola and rapeseed or oilseed rape, (Brassica napus), Polish canola (Brassica rapa), and related cruciferous vegetables including broccoli, kale, cabbage, and turnips (Brassica carinata, B. juncea, B. oleracea, B. napus, B. nigra, and B. rapa, and hybrids of these), carnation (Dianthus caryophyllus), carrots (Daucus carota sativus), cashew (Anacardium occidentale), cassava (Manihot esculentum), celery (Apium graveolens), cherry (Prunus avium), chestnut (Castanea spp.), chickpea or garbanzo (Cicer arietinum), chicory (Cichorium intybus), chili peppers and other capsicum peppers (Capsicum annuum, C. frutescens, C. chinense, C. pubescens, C. baccatum), chrysanthemums (Chrysanthemum spp.), citron (Citrus medica), coconut (Cocos nucifera), coffee (wild and domesticated Coffea spp. including Coffea arabica, Coffea canephora, and Coffea liberica), cotton (Gossypium hirsutum L.), cowpea (Vigna unguiculata and other Vigna spp.), fava beans (Vicia faba), cucumber (Cucumis sativus), currants and gooseberries (Ribes spp.), date (Phoenix dactylifera), duckweeds (family Lemnoideae), eggplant or aubergine (Solanum melongena), elderberries (Sambucus spp.), eucalyptus (Eucalyptus spp.), flax (Linum usitatissumum L.), geraniums (Pelargonium spp.), ginger (Zingiber officinale), ginseng (Panax spp.), grapefruit (Citrus x paradisi), grapes (Vitis spp.) including wine grapes (Vitis vinifera and hybrids thereof), guava (Psidium guajava), hazelnut (Corylus avellana, Corylus spp.), hemp and cannabis (Cannabis sativa and Cannabis spp.), hops (Humulus lupulus), horseradish (Armoracia rusticana), irises (Iris spp.), jackfruit (Artocarpus heterophyllus), kiwifruits (Actinidia spp.), kumquat (Citrus japonica), lemon (Citrus limon), lentil (Lens culinaris), lettuce (Lactuca sativa), limes (Citrus spp.), lychee (Litchi chinensis), macadamias (Macadamia spp.), maize or corn (Zea mays L.), mandarin (Citrus reticulata), mango (Mangifera indica), mangosteen (Garcinia mangostana), melon (Cucumis melo), millets (Setaria spp., Echinochloa spp., Eleusine spp., Panicum spp., Pennisetum spp.), oats (Avena sativa), oil palm (Ellis quineensis), okra (Abelmoschus esculentus), olive (Olea europaea), onion (Allium cepa) and other alliums (Allium spp.), orange (Citrus sinensis), papaya (Carica papaya), parsnip (Pastinaca sativa), passionfruit (Passiflora edulis), pecan (Carya illinoinensis), peaches and nectarines (Prunus persica), pear (Pyrus spp.), pea (Pisum sativum), peanut (Arachis hypogaea), peonies (Paeonia spp.), persimmons (Diospyros kaki, Diospyros spp.), petunias (Petunia spp.), pineapple (Ananas comosus), pistachio (Pistacia vera), plantains (Musa spp.), plum (Prunus domestica), poinsettia (Euphorbia pulcherrima), pomelo (Citrus maxima), poplar (Populus spp.), potato (Solanum tuberosum), pumpkins and squashes (Cucurbita pepo, C. maxima, C. moschata), quince (Cydonia oblonga), raspberries (Rubus idaeus, Rubus occidentalis, Rubus spp.), rhubarbs (Rheum spp.), rice (Oryza sativa L.), roses (Rosa spp.), rubber (Hevea brasiliensis), rye (Secale cereale), safflower (Carthamus tinctorius L), satsuma (Citrus unshiu), sesame seed (Sesame indium), sorghum (Sorghum bicolor), sour orange (Citrus x aurantium), soursop (Annona muricata), soybean (Glycine max L.), strawberries (Fragaria spp., Fragaria x ananassa), sugar beet (Beta vulgaris), sugarcanes (Saccharum spp.), sunflower (Helianthus annuus), sweet potato (Ipomoea batatas), tamarind (Tamarindus indica), tangerine (Citrus tangerina), tea (Camellia sinensis), tobacco (Nicotiana tabacum L.), tomatillo (Physalis philadelphica), tomato (Solanum lycopersicum or Lycopersicon esculentum), tulips (Tulipa spp.), walnuts (Juglans spp. L.), watermelon (Citrulus lanatus), wheat (Triticum aestivum), and yams (Discorea spp.). Wild relatives of domesticated plants are also of interest.

[0031] A further aspect of the disclosure relates to a transgenic seed of the transgenic plant of any of the preceding embodiments, wherein said seed includes the recombinant DNA construct.

[0032] An additional aspect of the disclosure relates to an F1 progeny plant having as at least one parent the transgenic plant of any of the preceding embodiments, wherein the F1 progeny plant includes any of the recombinant DNA constructs of the preceding embodiments.

[0033] Yet another aspect of the disclosure relates to a harvested product produced from the transgenic plant of any of the preceding embodiments, wherein the harvested product includes the recombinant DNA construct. In some embodiments of this aspect, the harvested product is a fruit, a leaf, a stem, a flower, a root, a tuber, or a seed.

[0034] An additional aspect of the disclosure relates to a plant having a genome that is modified to express a heterologous DNA sequence that encodes a polypeptide including at least one conidial germination-inhibiting (CGI) factor, CGI factor precursor, CGI factor fragment, or CGI factor motif optionally fused to at least one plant secretion signal peptide, wherein the CGI factor, the CGI factor precursor, the CGI factor fragment, or the CGI factor motif inhibits conidial germination, growth, or reproduction of a fungal pathogen of the plant and wherein the CGI factor includes an amino acid sequence that has at least 80% sequence identity with a sequence selected from the group of SEQ ID NO: 961-1920, SEQ ID NO: 1957-2189, SEQ ID NO: 2194-2210, SEQ ID NO: 2215-2243, SEQ ID NO: 2457-3361, or SEQ ID NO: 5707-5731, or wherein the CGI factor motif includes at least one of SEQ ID NO: 1921-1956, and wherein the plant has improved resistance to the fungal pathogen, in comparison to a control plant that does not express the heterologous DNA sequence. The nucleotide sequence encoding the at least one CGI factor may include SEQ ID NO: 1-960 or 3362-5698. In additional embodiments of this aspect, the nucleotide sequence of the at least one CGI factor, CGI factor precursor, CGI factor fragment, or CGI factor motif does not occur in the genome of the fungal pathogen. In further embodiments of this aspect, which may be combined with any preceding embodiment, the fungal pathogen is one of an Aspergillus species; Magnaporthe oryzae; Botrytis cinerea; a Puccinia species; Fusarium graminearum; Fusarium oxysporum; Blumeria graminis; Mycosphaerella graminicola; a Colletotrichum species; Ustilago maydis; Melampsora lini, Phakopsora pachyrhizi, or Rhizoctonia solani.

[0035] Yet another aspect of the disclosure relates to a plant including a cell containing a recombinant DNA construct for expressing a CGI factor, a CGI factor precursor, a CGI factor fragment, or a CGI factor motif and including: a heterologous promoter that is functional in the cell and is operably linked to a nucleic acid molecule including (a) a nucleotide sequence that encodes at least one conidial germination-inhibiting (CGI) factor, CGI factor precursor, CGI factor fragment, or CGI factor motif, and (b) a nucleotide sequence encoding at least one secretion signal peptide functional in the cells; wherein the CGI factor includes an amino acid sequence that has at least 80% sequence identity with a sequence selected from the group of SEQ ID NO: 961-1920, SEQ ID NO: 1957-2189, SEQ ID NO: 2194-2210, SEQ ID NO: 2215-2243, SEQ ID NO: 2457-3361, or SEQ ID NO: 5707-5731, or wherein the CGI factor motif includes at least one of SEQ ID NO: 1921-1956; and wherein the nucleotide sequence encoding the at least one CGI factor, CGI factor precursor, CGI factor fragment, or CGI factor motif optionally includes at least one codon optimized for expression in the cell. The nucleotide sequence encoding the at least one CGI factor may include SEQ ID NO: 1-960 or 3362-5698. In some embodiments of this aspect, the CGI factor, the CGI factor precursor, the CGI factor fragment, or the CGI factor motif is active and/or toxic. In further embodiments of this aspect, which may be combined with any preceding embodiment, the cell is a cell of the plant. In additional embodiments of this aspect, which may be combined with any preceding embodiment that has a cell that is not a cell of the plant, the cell is a bacterial or a fungal cell in or on the plant. In some embodiments of this aspect, which may be combined with any preceding embodiment, the plant has improved resistance to the fungal pathogen, in comparison to a control plant that does not include the cell. In yet another embodiment of this aspect, the fungal pathogen is one of an Aspergillus species; Magnaporthe oryzae; Botrytis cinerea; a Puccinia species; Fusarium graminearum; Fusarium oxysporum; Blumeria graminis; Mycosphaerella graminicola; a Colletotrichum species; Ustilago maydis; Melampsora lini, Phakopsora pachyrhizi, or Rhizoctonia solani. In still another embodiment of this aspect, which may be combined with any preceding embodiment, the nucleotide sequence encoding the at least one CGI factor, CGI factor precursor, CGI factor fragment, or CGI factor motif does not occur in the genome of the fungal pathogen.

### Compositions

[0036] Yet another aspect of the disclosure relates to an antifungal or fungicidal composition including the CGI factor, the CGI factor precursor, the CGI factor fragment, or the CGI factor motif of any one of the preceding embodiments and an agriculturally acceptable carrier. In some embodiments of this aspect, the composition is formulated as one of a seed treatment, a foliar spray treatment, a foliar drench treatment, a Ready-To-Use (RTU) formulation, a produce coating, a suspension concentrate, a tank-mix, an aerosol, a root dip, a drench, a fog, a soil treatment, an irrigation formulation, or a sprinkler formulation. In further embodiments of this aspect, the agriculturally acceptable carrier includes a solid carrier, a liquid carrier, a gel carrier, a suspension, or an emulsion. In additional embodiments of this aspect, the agriculturally acceptable carrier includes one or more of an adjuvant, an inert component, a dispersant, a surfactant, a tackifier, a binder, or a stabilizer. Adjuvants and other components useful in agricultural formulations are described, e.g., in the Compendium of Herbicidal Adjuvants, 13^{th} edition, 2016; available at siu-weeds[dot]com/adjuvants/index-adj[dot]html. In some embodiments of this aspect, such agricultural formulations further include one or more additional components, such as an herbicide, insecticide, nematicide, fungicide (other than the CGI factor, CGI factor precursor, CGI factor fragment, or CGI factor motifs herein disclosed), attractant, or bait. In some embodiments of this aspect, the composition is formulated for application to human-built structures (e.g., buildings, fencing, walls) or artifacts (e.g., furniture, clothing, fabrics) or for incorporation in materials useful for making human-built structures or artifacts. In some embodiments of this aspect, the composition is incorporated as an addition to food or feed, e.g., products processed from plants. In additional embodiments of this aspect, the compositions are formulated as slow-release or controlled-release formulations.

[0037] An additional aspect of the disclosure relates to an antifungal composition including an effective amount of at least one conidial germination-inhibiting (CGI) factor, CGI factor precursor, CGI factor fragment, or CGI factor motif, and that includes (a) an amino acid sequence of a CGI factor that has at least 50%, at least 55%, at least 60%, at least 65%, at least 70%, at least 75%, at least 80%, at least 85%, at least 90%, at least 91%, at least 92%, at least 93%, at least 94%, at least 95%, at least 96%, at least 97%, at least 98%, at least 99%, or 100% sequence identity with a sequence selected from the group SEQ ID NO: 961-1920, SEQ ID NO: 1957-2189, SEQ ID NO: 2194-2210, SEQ ID NO: 2215-2243, SEQ ID NO: 2457-3361, or SEQ ID NO: 5707-5731; or (b) an amino acid sequence of a CGI factor motif; and a carrier. In some embodiments of this aspect, the CGI factor motif includes at least one of SEQ ID NO: 1921-1956. In additional embodiments of this aspect, which may be combined with any preceding embodiment, the CGI factor, CGI factor precursor, or CGI factor fragment is active and/or toxic. In further embodiments of this aspect, which may be combined with any preceding embodiment, the carrier is selected from an agriculturally acceptable carrier, or a pharmaceutically acceptable carrier. In additional embodiments of this aspect, which may be combined with any preceding embodiment, the composition is formulated as a liquid, a gel, an emulsion, a suspension, an encapsulation, a solid, a powder, a coating, a spray, a soil drench, granules, a seed coat, or a bait. In some embodiments of this aspect, such agricultural formulations further include one or more additional components, such as an herbicide, insecticide, nematicide, fungicide (other than the CGI factor, CGI factor precursor, CGI factor fragment, or CGI factor motifs herein disclosed), attractant, or bait. In some embodiments of this aspect, the composition is formulated for application to human-built structures (e.g., buildings, fencing, walls) or artifacts (e.g., furniture, clothing, fabrics) or for incorporation in materials useful for making human-built structures or artifacts. In some embodiments of this aspect, the composition is incorporated as an addition to food or feed, e.g., products processed from plants. In additional embodiments of this aspect, the compositions are formulated as slow-release or controlled-release formulations.

[0038] Still another aspect of the disclosure relates to a composition having antifungal properties, including a substrate or matrix that is complexed with at least one conidial germination-inhibiting (CGI) factor, CGI factor precursor, CGI factor fragment, or CGI factor motif that is active and/or toxic, wherein the CGI factor includes an amino acid sequence that has at least 50%, at least 55%, at least 60%, at least 65%, at least 70%, at least 75%, at least 80%, at least 85%, at least 90%, at least 91%, at least 92%, at least 93%, at least 94%, at least 95%, at least 96%, at least 97%, at least 98%, at least 99%, or 100% sequence identity with a sequence selected from the group of SEQ ID NO: 961-1920, SEQ ID NO: 1957-2189, SEQ ID NO: 2194-2210, SEQ ID NO: 2215-2243, SEQ ID NO: 2457-3361, or SEQ ID NO: 5707-5731, or wherein the CGI factor motif includes at least one of SEQ ID NO: 1921-1956. In some embodiments of this aspect, the CGI factor, the CGI factor precursor, the CGI factor fragment, or the CGI factor motif is active and/or toxic. In further embodiments of this aspect, which may be combined with any preceding embodiment, the complexation between the substrate or matrix with the at least one CGI factor, CGI factor precursor, CGI factor fragment, or CGI factor motif is through: (a) covalent bonding, (b) non-covalent bonding, or (c) a combination of (a) and (b). In some embodiments of this aspect, the substrate or matrix includes polypeptides. In additional embodiments of this aspect, which may be combined with any preceding embodiment that has a substrate or matrix, the substrate or matrix includes self-assembling peptides.

[0039] Any suitable substrate or matrix known to those in the art may be applied to the present disclosure. In some embodiments, the substrate or matrix comprises polypeptides. In some embodiments, the polypeptides are self-assembling peptides. In some embodiments, the self-assembling peptide is (M)(YEYK)ₙYEY (SEQ ID NO: 2194), where n=3 or n is between 3-10, and where methionine is the terminal and optional amino acid, is covalently or non-covalently linked to one or more CGI peptides. Self-assembling peptide have been known to those of ordinary skill in the art, as demonstrated by Miki et al. (2021) Nature Communications, 21:3412, DOI: 10.1038/s41467-021-23794-6, which is specifically and entirely incorporated by reference herein for everything it teaches. In some embodiments, the complexation between the substrate or matrix and at least one CGI peptide is through covalent bonding. In some embodiments, the complexation between the substrate or matrix and at least one CGI peptide is through non-covalent bonding. In some embodiments, the complexation between the substrate or matrix and at least one CGI peptide is through a combination of covalent bonding and non-covalent bonding.

### Methods of Providing Fungal Resistance

[0040] A further aspect of the disclosure related to methods of providing an organism with resistance to a fungal pathogen of the organism, including expressing in a cell of the organism the recombinant DNA construct of any one of the preceding embodiments, wherein the heterologous promoter is functional in the organism. In further embodiments of this aspect, the nucleotide sequence encoding the CGI factor, the CGI factor precursor, the CGI factor fragment, or the CGI factor motif does not occur in the genome of the fungal pathogen. In additional embodiments of this aspect, the recombinant DNA construct is introduced into the cell of the organism by (a) transfection; (b) by inheritance from a parent cell; or (c) by fusion with a donor cell including the recombinant DNA construct. In yet further embodiments of this aspect, the organism is a plant, and wherein the recombinant DNA construct is provided to the plant by (a) transformation, or (b) inheritance from at least one parent plant that contained the recombinant DNA construct. Transformation may be stable or transient. In still another embodiment of this aspect, the plant is selected from the group of a maize plant, a soybean plant, a wheat plant, a rice plant, a cotton plant, a potato plant, a tomato plant, a Brassica spp. plant, or a sugar beet plant.

[0041] An additional aspect of the disclosure relates to methods of providing an organism with resistance to a fungal pathogen of the organism, including contacting the organism with the vector of any of the preceding embodiments. In further embodiments of this aspect, the nucleotide sequence encoding the CGI factor, the CGI factor precursor, the CGI factor fragment, or the CGI factor motif does not occur in the genome of the fungal pathogen.

[0042] Still another aspect of the disclosure relates to methods of providing an organism with resistance to a fungal pathogen of the organism, including contacting the organism with the cell of any of the preceding embodiments. In some embodiments of this aspect, the nucleotide sequence encoding the CGI factor, the CGI factor precursor, the CGI factor fragment, or the CGI factor motif does not occur in the genome of the fungal pathogen.

[0043] Still another aspect of the disclosure related to methods of producing a disease-resistant plant, including: introducing into a plant the recombinant DNA construct of any one of the preceding embodiments, wherein the CGI factor, CGI factor precursor, the CGI factor fragment, or the CGI factor motif is expressed in the plant; editing the plant to express a CGI factor including an amino acid sequence that has at least 50%, at least 55%, at least 60%, at least 65%, at least 70%, at least 75%, at least 80%, at least 85%, at least 90%, at least 91%, at least 92%, at least 93%, at least 94%, at least 95%, at least 96%, at least 97%, at least 98%, at least 99%, or 100% sequence identity with at least one of SEQ ID NO: 961-1920, SEQ ID NO: 1957-2189, SEQ ID NO: 2194-2210, SEQ ID NO: 2215-2243, SEQ ID NO: 2457-3361, or SEQ ID NO: 5707-5731, a CGI factor precursor, or a CGI factor fragment; or editing the plant to express a CGI factor motif, thereby producing a disease-resistant transgenic plant. In some embodiments of this aspect, the CGI factor motif includes at least one of SEQ ID NO: 1921-1956. The nucleotide sequence encoding the at least one CGI factor may include SEQ ID NO: 1-960 or 3362-5698. In additional embodiments of this aspect, which may be combined with any preceding embodiment, the CGI factor, CGI factor precursor, or CGI factor fragment is active and/or toxic. In further embodiments of this aspect, which may be combined with any preceding embodiment, editing the plant is performed using zinc finger-nucleases (ZFNs), transcription activator-like effector nucleases (TALENs), oligonucleotide-directed mutagenesis (ODM), or a clustered regularly interspaced short palindromic repeats (CRISPR) nuclease (e.g., Cas9, Cas12), or by gene writing (see, e.g., PCT Patent Application Publication WO2020/047124). In still another embodiment of this aspect, which may be combined with any preceding embodiment, the introducing step is achieved by (a) transforming the plant; or (b) crossing a first plant including the recombinant DNA construct with a second plant. In yet another embodiment of this aspect, which may be combined with any preceding embodiment, the introducing step includes transforming the plant, and wherein transforming the plant includes bacterially mediated transformation, micro-projectile-mediated transformation, sonication, electroporation, nanoparticle-mediated transformation, or liposome- or spheroplast-mediated vector delivery. An additional embodiment of this aspect, which may be combined with any preceding embodiment, includes the plant being a maize plant, a soybean plant, a wheat plant, a rice plant, a cotton plant, a potato plant, a tomato plant, a Brassica spp. plant, or a sugar beet plant.

[0044] Some aspects of the disclosure relate to methods of providing an organism with resistance to a fungal pathogen of the organism, including contacting the organism with the antifungal composition of any one of the preceding embodiments. In further embodiments of this aspect, the amino acid sequence of the CGI factor is not that of an alpha pheromone natively expressed by the fungal pathogen, or the nucleotide sequence encoding the CGI factor, the CGI factor precursor, the CGI factor fragment, or the CGI factor motif does not occur in the genome of the fungal pathogen.

[0045] In some embodiments, the methods of the present disclosure provide resistance to a fungal pathogen selected from the group consisting of Aspergillus, Candida, Coccidioides, Histoplasma, or Blastomyces fungus. In some embodiments, the fungal pathogen is a Mucoromycotina fungus, a Candida species (e.g., C. albicans, C. tropicalis, C. krusei, C. glabrata and C. pseudotropicalis), an Aspergillus species (e.g., A. fumigatus, A. flavus and A. niger.), Magnaporthe oryzae, Botrytis cinerea, Puccinia spp., Fusarium graminearum, Fusarium oxysporum, Blumeria graminis, Mycosphaerella graminicola, Colletotrichum spp., Ustilago maydis, Melampsora lini, Phakopsora pachyrhizi, or Rhizoctonia solani. In some embodiments, the methods of the present disclosure provide resistance to a fungal pathogen of plants. In some embodiments, the fungal pathogen of plants is Magnaporthe oryzae; Botrytis cinerea; Puccinia spp.; Fusarium graminearum; Fusarium oxysporum; Blumeria graminis; Mycosphaerella graminicola; Colletotrichum spp.; Ustilago maydis; Melampsora lini; Phakopsora pachyrhizi; or Rhizoctonia solani.

### Methods of Controlling or Preventing Fungal Growth

[0046] A further aspect of the disclosure relates to methods of controlling a fungal pathogen, including delivering to the fungal pathogen or an environment thereof a composition including an effective amount of the CGI factor, the CGI factor precursor, the CGI factor fragment, or the CGI factor motif of any one of the preceding embodiments.

[0047] A further aspect of the disclosure relates to methods for controlling a fungal pathogen, the method including: applying, to the fungal pathogen or a locus containing the fungal pathogen, a composition including a conidial germination-inhibiting (CGI) factor, a CGI factor precursor, a CGI factor fragment, or a CGI factor motif derived from a least one of the fungal pathogen, a fungus in the same genus as the fungal pathogen, a fungus in a different genus than the fungal pathogen, or a mixture thereof. In some embodiments of this aspect, the CGI factor has an amino acid sequence selected from the group of SEQ ID NO: 961-1920, SEQ ID NO: 1957-2189, SEQ ID NO: 2194-2210, SEQ ID NO: 2215-2243, SEQ ID NO: 2457-3361, or SEQ ID NO: 5707-5731 or an amino acid sequence having at least 50%, at least 55%, at least 60%, at least 65%, at least 70%, at least 75%, at least 80%, at least 85%, at least 90%, at least 91%, at least 92%, at least 93%, at least 94%, at least 95%, at least 96%, at least 97%, at least 98%, at least 99%, or 100% sequence identity thereto; or wherein the CGI factor motif includes at least one of SEQ ID NO: 1921-1956. The nucleotide sequence encoding the at least one CGI factor may include SEQ ID NO: 1-960 or 3362-5698. In additional embodiments of this aspect, which may be combined with any preceding embodiment, the CGI factor, the CGI factor precursor, the CGI factor fragment, or the CGI factor motif is active and/or toxic. As used herein, a CGI factor, CGI factor precursor, CGI factor fragment, or CGI factor motif “derived from” a fungal pathogen refers to a CGI factor, CGI factor precursor, CGI factor fragment, or CGI factor motif directly obtained (e.g., extracted) or indirectly obtained (e.g., a synthetic CGI factor or precursor thereof having a sequence that is based on one or more fungal pathogen CGI factor sequences) from a fungal pathogen. In some embodiments, the amino acid sequence of a CGI factor, CGI factor precursor, CGI factor fragment, or CGI factor motif “derived from” a fungal pathogen corresponds to the amino acid sequence of a naturally occurring fungal alpha pheromone peptide, e.g., has an amino acid sequence that is identical or near identical (e.g., >90% sequence identity) to a genomically encoded expressed or putative alpha pheromone peptide sequence of the fungal pathogen. In embodiments, the amino acid sequence of a CGI factor, CGI factor precursor, CGI factor fragment, or CGI factor motif “derived from” a fungal pathogen includes combinations of more than one naturally occurring fungal alpha pheromone peptide, e.g., homodimers of a single fungal alpha pheromone peptide or heterodimers of two different alpha pheromone peptides, or multimers of one or more alpha pheromone peptide, with or without additional amino acids (e.g., flanking or linking amino acids adjacent to or in between the alpha pheromone monomers). In other embodiments, the sequence of a CGI factor, CGI factor precursor, CGI factor fragment, or CGI factor motif “derived from” a fungal pathogen is shorter or longer relative to that sequence in the fungal pathogen. For example, a synthetic CGI factor or CGI factor precursor can include additional amino acids inserted into the sequence of a naturally occurring fungal alpha pheromone (or alpha pheromone precursor) sequence; in embodiments, the additional amino acids provide a desired characteristic or function, relative to a polypeptide lacking the additional amino acids, such as, but not limited to: increased solubility, modified charge, improved detectability or selectability (e.g., using a detectable or selectable sequence such as a reporter or epitope), increased stability, increased cell penetration, or modified cellular or tissue location (e.g., localization to a cellular organelle or to a particular tissue). In some embodiments, a synthetic CGI factor or CGI factor precursor includes sequence derived from multiple naturally occurring CGI factors identified from one or more fungal pathogens (e.g., a synthetic CGI factor that is a heterodimer or other multimer wherein the unit sequences are CGI factor sequences identified from different fungal species, optionally with linker amino acids joining the unit sequences). Additionally, the CGI factor, CGI factor precursor, CGI factor fragment, or CGI factor motif “derived from” a fungal pathogen may have additional amino acid residues added to it, for example, a linker sequence, a signal peptide sequence, or similar.

[0048] An additional aspect of the disclosure relates to methods of controlling growth or reproduction of a fungus, including providing the fungus with a composition including an effective amount of at least one conidial germination-inhibiting (CGI) factor, CGI factor precursor, CGI factor fragment, or CGI factor motif, wherein the CGI factor includes an amino acid sequence that has at least 50%, at least 55%, at least 60%, at least 65%, at least 70%, at least 75%, at least 80%, at least 85%, at least 90%, at least 91%, at least 92%, at least 93%, at least 94%, at least 95%, at least 96%, at least 97%, at least 98%, at least 99%, or 100% sequence identity with a sequence selected from the group of SEQ ID NO: 961-1920, SEQ ID NO: 1957-2189, SEQ ID NO: 2194-2210, SEQ ID NO: 2215-2243, SEQ ID NO: 2457-3361, or SEQ ID NO: 5707-5731, or wherein the CGI factor motif includes at least one of SEQ ID NO: 1921-1956, and wherein the amino acid sequence of the CGI factor is not that of an alpha pheromone natively expressed by the fungus, or wherein the nucleotide sequence of the at least one CGI factor, CGI factor precursor, CGI factor fragment, or CGI factor motif does not occur in the genome of the fungus. The nucleotide sequence encoding the at least one CGI factor may include SEQ ID NO: 1-960 or 3362-5698. In some embodiments of this aspect, the CGI factor, the CGI factor precursor, the CGI factor fragment, or the CGI factor motif is active and/or toxic. In further embodiments of this aspect, which may be combined with any preceding embodiment, the composition is provided to the fungus by directly contacting the fungus with the composition, or by delivering the composition to the environment of the fungus.

[0049] Yet another aspect of the disclosure relates to methods of preventing growth of a fungus on a surface, including treating the surface with a composition including an effective amount of at least one conidial germination-inhibiting (CGI) factor, CGI factor precursor, CGI factor fragment, or CGI factor motif, wherein the CGI factor includes an amino acid sequence that has at least 50%, at least 55%, at least 60%, at least 65%, at least 70%, at least 75%, at least 80%, at least 85%, at least 90%, at least 91%, at least 92%, at least 93%, at least 94%, at least 95%, at least 96%, at least 97%, at least 98%, at least 99%, or 100% sequence identity with a sequence selected from the group of SEQ ID NO: 961-1920, SEQ ID NO: 1957-2189, SEQ ID NO: 2194-2210, SEQ ID NO: 2215-2243, SEQ ID NO: 2457-3361, or SEQ ID NO: 5707-5731, or wherein the CGI factor motif includes at least one of SEQ ID NO: 1921-1956. The nucleotide sequence encoding the at least one CGI factor may include SEQ ID NO: 1-960 or 3362-5698. In some embodiments of this aspect, the CGI factor, the CGI factor precursor, the CGI factor fragment, or the CGI factor motif is active and/or toxic. In further embodiments of this aspect, which may be combined with any preceding embodiment, the surface is a non-living surface or is the surface of a living organism. In additional embodiments of this aspect, which may be combined with any preceding embodiment, the nucleotide sequence of the at least one CGI factor, CGI factor precursor, CGI factor fragment, or CGI factor motif does not occur in the genome of the fungus.

[0050] Also provided herein is a method of preventing growth of a fungus on a surface or within a structure (e.g., a human-built structure or artifact). In some embodiments, the method comprises treating the surface or structure with a composition (e.g., a paint, coating, spray, or dip) comprising an effective amount of at least one CGI factor, CGI factor precursor, CGI factor fragment, or CGI factor motif that inhibits growth or reproduction of the fungus. In some embodiments, the CGI factor comprises an amino acid sequence that has at least 50%, at least 55%, at least 60%, at least 65%, at least 70%, at least 75%, at least 80%, at least 85%, at least 90%, at least 91%, at least 92%, at least 93%, at least 94%, at least 95%, at least 96%, at least 97%, at least 98%, at least 99%, or 100% sequence identity with a sequence selected from the group consisting of SEQ ID NO: 961-1920, or from the group consisting of SEQ ID NO: 1957-2189, or from the group consisting of SEQ ID NO: 2194-2210, or from the group consisting of SEQ ID NO: 2215-2243, or from the group consisting of SEQ ID NO: 2457-3361, or from the group consisting of SEQ ID NO: 5707-5731. In embodiments, the nucleotide sequence encoding the at least one CGI factor includes at least one sequence selected from the group consisting of SEQ ID NO: 1-960 or 3362-5698. In some embodiments, the DNA sequence of the at least one CGI factor, CGI factor precursor, CGI factor fragment, or CGI factor motif does not occur in the genome of the fungus.

[0051] In some embodiments, the surface is a non-living surface. In some embodiments, the surface is a surface of a living organism. In embodiments, the structure is a human-built structure or artifact, such as a building, fence, wall, furniture, fabric, or components thereof.

### Methods of Treating a Fungal Disease

[0052] A further aspect of the disclosure relates to methods of treating a subject with a fungal disease including administering to a subject an antifungal or fungicidal composition including the CGI factor, the CGI factor precursor, the CGI factor fragment, or the CGI factor motif of any of the preceding embodiments and a pharmaceutically acceptable carrier. In some embodiments of this aspect, the subject is a mammal; in other embodiments the subject is a vertebrate such as a bird, reptile, fish, or amphibian, or is an invertebrate such as an insect. In additional embodiments of this aspect, the mammal is a human. In further embodiments of this aspect, the mammal is a domestic animal or livestock. In still further embodiments of this aspect, which may be combined with any preceding embodiment, the fungal disease is caused by a fungal pathogen selected from the group of Aspergillus, Candida, Coccidioides, Histoplasma, Cryptococcus, Pneumocystis, or Blastomyces fungus. In some embodiments, the fungal disease is an infection of a Mucoromycotina fungus, a Candida species (e.g., C. albicans, C. auris, C. tropicalis, C. krusei, C. glabrata, C. parapsilosis, and C. pseudotropicalis), a Coccidioides species (e.g., C. immitis or C. posadasii), an Aspergillus species (e.g., A. fumigatus, A. flavus, and A. niger), a Mucor species, a Rhizomucor species, a Malassezia species (e.g., M. furfur, M. globose, and M. restricta), Magnaporthe oryzae, Botrytis cinerea, Puccinia spp., Fusarium graminearum; Fusarium oxysporum, Blumeria graminis, Mycosphaerella graminicola, Colletotrichum spp., Ustilago maydis; Melampsora lini, Phakopsora pachyrhizi, or Rhizoctonia solani. In yet another embodiment of this aspect, which may be combined with any preceding embodiment, the fungal disease is aspergillosis, blastomycosis, candidiasis, coccidioidomycosis, histoplasmosis, mucormycosis, mycetoma, ringworm, sporotrichosis, paracoccidioidomycosis, talaromycosis, chromoblastomycosis fusariosis, emergomycosis, scedosporiosis, or fungal meningitis. In additional embodiments of this aspect, which may be combined with any preceding embodiments, the antifungal or fungicidal composition is administered intravenously, intramuscularly, subcutaneously, topically, orally, transdermally, intraperitoneally, intraorbitally, by implantation, by inhalation, intrathecally, intraventricularly, or intranasally.

[0053] As used herein, the term “subject” refers to an organism, such as an animal, plant, or microbe. In some embodiments, the subject is a mammal. In some embodiments, the mammal is a human. In other embodiments, the subject is a domestic animal or livestock. In some embodiments, the subject is a non-mammal. In some embodiments, the non-mammal is a reptile, an insect, an amphibian, a bird, or a fish. In embodiments, the subject is a vertebrate animal (e.g., mammal, bird, cartilaginous or bony fish, reptile, or amphibian). In embodiments, the subject is a human; including adults and non-adults (infants and children). In embodiments, the subject is a non-human mammal, such as a non-human primate (e.g., monkeys, apes), ungulate (e.g., cattle, buffalo, bison, sheep, goat, pig, camel, llama, alpaca, deer, horses, donkeys), carnivore (e.g., dog, cat), rodent (e.g., rat, mouse), or lagomorph (e.g., rabbit). In embodiments, the subject is a bird, such as a member of the avian taxa Galliformes (e.g., chickens, turkeys, pheasants, quail), Anseriformes (e.g., ducks, geese), Paleaognathae (e.g., ostriches, emus), Columbiformes (e.g., pigeons, doves), or Psittaciformes (e.g., parrots). In embodiments, the subject is an invertebrate such as an arthropod (e.g, insects, arachnids, crustaceans), a nematode, an annelid, a helminth, or a mollusc. In embodiments, the subject is an organism that is part of a symbiosis, such as part of the microbiome of an animal or a plant. In embodiments, the subject is a plant, such as an angiosperm plant (which can be a dicot or a monocot) or a gymnosperm plant (e.g., a conifer, a cycad, a gnetophyte, a Ginkgo), a fern, horsetail, clubmoss, or a bryophyte. In embodiments, the subject is a eukaryotic alga (unicellular or multicellular). In embodiments, the subject is a plant of agricultural or horticultural importance, such as row crop plants, fruit-producing plants and trees, vegetables, trees, and ornamental plants including ornamental flowers, shrubs, trees, groundcovers, and turf grasses. Plants and plant cells are of any species of interest, including dicots and monocots. Plants of interest include row crop plants, fruit-producing plants and trees, vegetables, trees, and ornamental plants including ornamental flowers, shrubs, trees, groundcovers, and turf grasses.

### Enumerated Embodiments

1. A recombinant DNA construct comprising:
[0054] a heterologous promoter operably linked to a nucleic acid molecule comprising a nucleotide sequence that encodes a conidial germination-inhibiting (CGI) factor, a CGI factor precursor, or a CGI factor fragment,
[0055] wherein the nucleotide sequence
   [0056] (a) encodes at least one CGI factor comprising an amino acid sequence that has at least 80% sequence identity with at least one of SEQ ID NO: 961-1920, SEQ ID NO: 1957-2189, SEQ ID NO: 2194-2210, SEQ ID NO: 2215-2243, SEQ ID NO: 2457-3361, or SEQ ID NO: 5707-5731 at least one CGI factor precursor, or at least one CGI factor fragment,
   [0057] (b) is a synthetic sequence of (a) that has codons optimized for heterologous expression; or
   [0058] (c) encodes at least one CGI factor motif.
      2. The recombinant DNA construct of embodiment 2, wherein the CGI factor motif comprises at least one of SEQ ID NO: 1921-1956.
      3. The recombinant DNA construct of embodiment 1 or embodiment 2, wherein the CGI factor, CGI factor precursor, or CGI factor fragment is active and/or toxic.
      4. The recombinant DNA construct of any one of embodiments 1-3, wherein the recombinant DNA construct comprises (a) at least one copy of a CGI factor, (b) at least one copy each of two or more CGI factors, (c) at least one CGI factor precursor, (d) at least one CGI factor fragment, (e) at least one CGI factor motif, or (f) any combination of (a) to (e).
      5. The recombinant DNA construct of any one of embodiments 1-4, wherein the heterologous promoter is a bacterial promoter, a fungal promoter, an algal promoter, an animal promoter, or a plant promoter.
      6. The recombinant DNA construct of any one of embodiments 1-5, wherein the heterologous promoter is a plant expressible promoter.
      7. The recombinant DNA construct of embodiment 6, wherein the plant expressible promoter is selected from the group of promoters consisting of a ubiquitin promoter, a cestrum yellow virus promoter, a corn TrpA promoter, a OsMADS 6 promoter, a maize H3 histone promoter, a corn sucrose synthetase 1 promoter, a corn alcohol dehydrogenase 1 promoter, a corn heat shock protein promoter, a maize mtl promoter, a pea small subunit RuBP carboxylase promoter, a rice actin promoter, a rice cyclophilin promoter, a Ti plasmid mannopine synthase promoter, a Ti plasmid nopaline synthase promoter, a petunia chalcone isomerase promoter, a bean glycine rich protein 1 promoter, a potato patatin promoter, a lectin promoter, a CaMV 35S promoter, and a S-E9 small subunit RuBP carboxylase promoter.
      8. The recombinant DNA construct of any one of embodiments 1-7, wherein the recombinant DNA construct further comprises a nucleotide sequence encoding at least one secretion signal peptide functional in a cell.
      9. A method of providing an organism with resistance to a fungal pathogen of the organism, comprising expressing in a cell of the organism the recombinant DNA construct of any one of embodiments 1-8, wherein the heterologous promoter is functional in the organism.
      10. The method of embodiment 9, wherein the nucleotide sequence encoding the CGI factor, the CGI factor precursor, the CGI factor fragment, or the CGI factor motif does not occur in the genome of the fungal pathogen.
      11. The method of embodiment 9, wherein the recombinant DNA construct is introduced into the cell of the organism by (a) transfection; (b) by inheritance from a parent cell; or (c) by fusion with a donor cell comprising the recombinant DNA construct.
      12. The method of embodiment 9, wherein the organism is a plant, and wherein the recombinant DNA construct is provided to the plant by (a) transformation, or (b) inheritance from at least one parent plant that contained the recombinant DNA construct.
      13. The method of embodiment 12, wherein the plant is selected from the group consisting of a maize plant, a soybean plant, a wheat plant, a rice plant, a cotton plant, a potato plant, a tomato plant, a Brassica spp. plant, and a sugar beet plant.
      14. A CGI factor, a CGI factor precursor, a CGI factor fragment, or a CGI factor motif encoded by the recombinant DNA construct of any one of embodiments 1-8.
      15. An antifungal or fungicidal composition comprising the CGI factor, the CGI factor precursor, the CGI factor fragment, or the CGI factor motif of embodiment 14 and an agriculturally acceptable carrier.
      16. The antifungal or fungicidal composition of embodiment 15, wherein the composition is formulated as one of a seed treatment, a foliar spray treatment, a foliar drench treatment, a Ready-To-Use (RTU) formulation, a produce coating, a suspension concentrate, a tank-mix, an aerosol, a root dip, a drench, a fog, a soil treatment, an irrigation formulation, or a sprinkler formulation. 17. The antifungal or fungicidal composition of embodiment 15, wherein the agriculturally acceptable carrier comprises a solid carrier, a liquid carrier, a gel carrier, a suspension, or an emulsion.
      18. The antifungal or fungicidal composition of embodiment 15, wherein the agriculturally acceptable carrier comprises one or more of an adjuvant, an inert component, a dispersant, a surfactant, a tackifier, a binder, or a stabilizer.
      19. A recombinant vector comprising the recombinant DNA construct of any one of embodiments 1-8.
      20. The vector of embodiment 19, wherein the vector comprises a left T-DNA border and a right T-DNA border flanking the recombinant DNA construct.
      21. The vector of embodiment 19, wherein the vector is a viral vector.
      22. A method of providing an organism with resistance to a fungal pathogen of the organism, comprising contacting the organism with the vector of embodiment 19.
      23. The method of embodiment 22, wherein the nucleotide sequence encoding the CGI factor, the CGI factor precursor, the CGI factor fragment, or the CGI factor motif does not occur in the genome of the fungal pathogen.
      24. An RNA transcript resulting from the transcription of the recombinant DNA construct of any one of embodiments 1-8.
      25. A transgenic cell comprising the recombinant vector of embodiment 19.
      26. The transgenic cell of embodiment 25, wherein the cell is selected from a bacterial cell, a fungal cell, an algal cell, an animal cell, or a plant cell.
      27. The transgenic cell of embodiment 26, wherein the transgenic cell is a plant cell.
      28. The transgenic cell of embodiment 27, wherein the plant cell is a dicot plant cell.
      29. The transgenic cell of embodiment 28, wherein the dicot plant cell is selected from the group consisting of a soybean cell, a sunflower cell, a tomato cell, a Brassica spp. cell, a cotton cell, a sugar beet cell, and a tobacco cell.
      30. The transgenic cell of embodiment 27, wherein the plant cell is a monocot plant cell.
      31. The transgenic cell of embodiment 30, wherein the monocot plant cell is selected from the group consisting of a barley cell, a maize cell, an oat cell, a rice cell, a sorghum cell, a sugar cane cell, and a wheat cell.
      32. The transgenic cell of any one of embodiments 25-31, wherein the CGI factor, the CGI factor precursor, the CGI factor fragment, or the CGI factor motif is (a) transiently expressed, or (b) stably expressed.
      33. A method of providing an organism with resistance to a fungal pathogen of the organism, comprising contacting the organism with the cell of embodiment 25.
      34. The method of embodiment 33, wherein the nucleotide sequence encoding the CGI factor, the CGI factor precursor, the CGI factor fragment, or the CGI factor motif does not occur in the genome of the fungal pathogen.
      35. A transgenic plant comprising the transgenic plant cell of embodiment 27.
      36. The transgenic plant of embodiment 35, wherein the transgenic plant is a dicot plant.
      37. The transgenic plant of embodiment 36, wherein the dicot plant is selected from the group consisting of a soybean plant, a sunflower plant, a tomato plant, a Brassica spp. plant, a cotton plant, a sugar beet plant, and a tobacco plant.
      38. The transgenic plant of embodiment 35, wherein the transgenic plant is a monocot plant.
      39. The transgenic plant of embodiment 38, wherein the monocot plant is selected from the group consisting of a barley plant, a maize plant, an oat plant, a rice plant, a sorghum plant, a sugar cane plant, and a wheat plant.
      40. The transgenic plant of embodiment 35, wherein the plant has improved resistance to the fungal pathogen, in comparison to a control plant that does not comprise the transgenic plant cell.
      41. The transgenic plant of embodiment 39, wherein the fungal pathogen is one of an Aspergillus species; Magnaporthe oryzae; Botrytis cinerea; a Puccinia species; Fusarium graminearum; Fusarium oxysporum; Blumeria graminis; Mycosphaerella graminicola; a Colletotrichum species; Ustilago maydis; Melampsora lini, Phakopsora pachyrhizi, or Rhizoctonia solani.
      42. The transgenic plant of any one of embodiments 35-41, wherein the nucleotide sequence encoding the CGI factor, the CGI factor precursor, the CGI factor fragment, or the CGI factor motif does not occur in the genome of the fungal pathogen.
      43. A transgenic seed of the transgenic plant of embodiment 35, wherein said seed comprises the recombinant DNA construct.
      44. An F1 progeny plant having as at least one parent the transgenic plant of embodiment 35, wherein the F1 progeny plant comprises the recombinant DNA construct.
      45. A harvested product produced from the transgenic plant of embodiment 35, wherein the harvested product comprises the recombinant DNA construct. 46. The harvested product of embodiment 45, wherein the harvested product is a fruit, a leaf, a stem, a flower, a root, a tuber, or a seed.
      47. A method of producing a disease-resistant plant, comprising:
[0059] introducing into a plant the recombinant DNA construct of any one of embodiments 1-8, wherein the CGI factor, CGI factor precursor, the CGI factor fragment, or the CGI factor motif is expressed in the plant;
[0060] editing the plant to express a CGI factor comprising an amino acid sequence that has at least 80% sequence identity with at least one of SEQ ID NO: 961-1920, SEQ ID NO: 1957-2189, SEQ ID NO: 2194-2210, SEQ ID NO: 2215-2243, SEQ ID NO: 2457-3361, or SEQ ID NO: 5707-5731, a CGI factor precursor, or a CGI factor fragment; or
[0061] editing the plant to express a CGI factor motif,
[0062] thereby producing a disease-resistant transgenic plant that is resistant to diseases caused by a fungus or oomycete.
   48. The method of embodiment 47, wherein the CGI factor motif comprises at least one of SEQ ID NO: 1921-1956.
   49. The method of embodiment 47 or embodiment 48, wherein the CGI factor, CGI factor precursor, or CGI factor fragment inhibits growth of and/or is toxic to the fungus or oomycete.
   50. The method of any one of embodiments 47-49, wherein editing the plant is performed using zinc finger-nucleases (ZFNs), transcription activator-like effector nucleases (TALENs), oligonucleotide-directed mutagenesis (ODM), or a clustered regularly interspaced short palindromic repeats (CRISPR)/Cas nuclease.
   51. The method of any one of embodiments 47-49, wherein the introducing step is achieved by (a) transforming the plant; or (b) crossing a first plant comprising the recombinant DNA construct with a second plant.
   52. The method of any one of embodiments 47-49, wherein the introducing step comprises transforming the plant, and wherein transforming the plant comprises bacterially mediated transformation, micro-projectile-mediated transformation, sonication, electroporation, nanoparticle-mediated transformation, or liposome- or spheroplast-mediated vector delivery.
   53. The method of any one of embodiments 47-52, wherein the plant is a maize plant, a soybean plant, a wheat plant, a rice plant, a cotton plant, a potato plant, a tomato plant, a Brassica spp. plant, or a sugar beet plant.
   54. A method of controlling a fungal pathogen, comprising delivering to the fungal pathogen or an environment thereof a composition comprising an effective amount of the CGI factor, the CGI factor precursor, the CGI factor fragment, or the CGI factor motif of embodiment 14.
   55. An antifungal composition comprising
[0063] (a) an effective amount of at least one conidial germination-inhibiting (CGI) factor, CGI factor precursor, CGI factor fragment, or CGI factor motif, and that comprises
   [0064] (i) a polypeptide comprising an amino acid sequence that has at least 80% sequence identity with a sequence selected from the group consisting of SEQ ID NO: 961-1920, SEQ ID NO: 1957-2189, SEQ ID NO: 2194-2210, SEQ ID NO: 2215-2243, SEQ ID NO: 2457-3361, or SEQ ID NO: 5707-5731; or
   [0065] (ii) a polypeptide comprising the amino acid sequence of a CGI factor motif; and
[0066] (b) a carrier.
   56. The antifungal composition of embodiment 53, wherein the CGI factor motif comprises at least one of SEQ ID NO: 1921-1956.
   57. The antifungal composition of embodiment 55 or embodiment 56, wherein the CGI factor, CGI factor precursor, or CGI factor fragment is inhibits growth of and/or is toxic to a fungus or oomycete.
   58. The antifungal composition of any one of embodiments 55-57, wherein the carrier is selected from an agriculturally acceptable carrier, or a pharmaceutically acceptable carrier.
   59. The antifungal composition of any one of embodiments 55-58, wherein the composition is formulated as a liquid, a gel, an emulsion, a suspension, an encapsulation, a solid, a powder, a coating, a spray, a soil drench, granules, a seed coat, or a bait.
   60. A method of providing an organism with resistance to a fungal pathogen of the organism, comprising contacting the organism with the antifungal composition of any one of embodiments 55-59.
   61. The method of embodiment 60, wherein the nucleotide sequence encoding the CGI factor, the CGI factor precursor, the CGI factor fragment, or the CGI factor motif does not occur in the genome of the fungal pathogen.
   62. A method for controlling a fungal pathogen, the method comprising:
[0067] applying, to the fungal pathogen or a locus containing the fungal pathogen, a composition comprising a conidial germination-inhibiting (CGI) factor, a CGI factor precursor, a CGI factor fragment, or a CGI factor motif derived from a least one of the fungal pathogen, a fungus in the same genus as the fungal pathogen, a fungus in a different genus than the fungal pathogen, or a mixture thereof.
   63. The method of embodiment 62, wherein the CGI factor has an amino acid sequence selected from the group consisting of SEQ ID NO: 961-1920, SEQ ID NO: 1957-2189, SEQ ID NO: 2194-2210, SEQ ID NO: 2215-2243, SEQ ID NO: 2457-3361, or SEQ ID NO: 5707-5731 or an amino acid sequence having at least 80% sequence identity thereto; or wherein the CGI factor motif comprises at least one of SEQ ID NO: 1921-1956.
   64. The method of embodiment 62 or embodiment 63, wherein the CGI factor, the CGI factor precursor, the CGI factor fragment, or the CGI factor motif is active and/or toxic.
   65. A plant having a genome that is modified to express a heterologous DNA sequence that encodes a polypeptide comprising at least one conidial germination-inhibiting (CGI) factor, CGI factor precursor, CGI factor fragment, or CGI factor motif optionally fused to at least one plant secretion signal peptide, wherein the CGI factor, the CGI factor precursor, the CGI factor fragment, or the CGI factor motif inhibits conidial germination, growth, or reproduction of a fungal pathogen of the plant and wherein the CGI factor comprises an amino acid sequence that has at least 80% sequence identity with a sequence selected from the group consisting of SEQ ID NO: 961-1920, SEQ ID NO: 1957-2189, SEQ ID NO: 2194-2210, SEQ ID NO: 2215-2243, SEQ ID NO: 2457-3361, or SEQ ID NO: 5707-5731, or wherein the CGI factor motif comprises at least one of SEQ ID NO: 1921-1956, and wherein the plant has improved resistance to the fungal pathogen, in comparison to a control plant that does not express the heterologous DNA sequence.
   66. The plant of embodiment 65, wherein the nucleotide sequence of the at least one CGI factor, CGI factor precursor, CGI factor fragment, or CGI factor motif does not occur in the genome of the fungal pathogen.
   67. The plant of embodiment 65 or embodiment 66, wherein the fungal pathogen is one of an Aspergillus species; Magnaporthe oryzae; Botrytis cinerea; a Puccinia species; Fusarium graminearum; Fusarium oxysporum; Blumeria graminis; Mycosphaerella graminicola; a Colletotrichum species; Ustilago maydis; Melampsora lini, Phakopsora pachyrhizi, or Rhizoctonia solani.
   68. A plant comprising a cell containing a recombinant DNA construct for expressing a CGI factor, a CGI factor precursor, a CGI factor fragment, or a CGI factor motif and comprising:
[0068] a heterologous promoter that is functional in the cell and is operably linked to a nucleic acid molecule comprising (a) a nucleotide sequence that encodes at least one conidial germination-inhibiting (CGI) factor, CGI factor precursor, CGI factor fragment, or CGI factor motif, and (b) a nucleotide sequence encoding at least one secretion signal peptide functional in the cells;
[0069] wherein the CGI factor comprises an amino acid sequence that has at least 80% sequence identity with a sequence selected from the group consisting of SEQ ID NO: 961-1920, SEQ ID NO: 1957-2189, SEQ ID NO: 2194-2210, SEQ ID NO: 2215-2243, SEQ ID NO: 2457-3361, or SEQ ID NO: 5707-5731, or wherein the CGI factor motif comprises at least one of SEQ ID NO: 1921-1956; and
[0070] wherein the nucleotide sequence encoding the at least one CGI factor, CGI factor precursor, CGI factor fragment, or CGI factor motif optionally includes at least one codon optimized for expression in the cell.
   69. The plant of embodiment 68, wherein the CGI factor, the CGI factor precursor, the CGI factor fragment, or the CGI factor motif is active and/or toxic.
   70. The plant of embodiment 68 or embodiment 69, wherein the cell is a cell of the plant.
   71. The plant of embodiment 68 or embodiment 69, wherein the cell is a bacterial or a fungal cell in or on the plant.
   72. The plant of any one of embodiments 68-71, wherein the plant has improved resistance to the fungal pathogen, in comparison to a control plant that does not comprise the cell.
   73. The plant of embodiment 72, wherein the fungal pathogen is one of an Aspergillus species; Magnaporthe oryzae; Botrytis cinerea; a Puccinia species; Fusarium graminearum; Fusarium oxysporum; Blumeria graminis; Mycosphaerella graminicola; a Colletotrichum species; Ustilago maydis; Melampsora lini, Phakopsora pachyrhizi, or Rhizoctonia solani.
   74. The plant of any one of embodiments 68-73, wherein the nucleotide sequence encoding the at least one CGI factor, CGI factor precursor, CGI factor fragment, or CGI factor motif does not occur in the genome of the fungal pathogen.
   75. A method of controlling growth or reproduction of a fungus, comprising providing the fungus with a composition comprising an effective amount of at least one conidial germination-inhibiting (CGI) factor, CGI factor precursor, CGI factor fragment, or CGI factor motif, wherein the CGI factor comprises an amino acid sequence that has at least 80% sequence identity with a sequence selected from the group consisting of SEQ ID NO: 961-1920, SEQ ID NO: 1957-2189, SEQ ID NO: 2194-2210, SEQ ID NO: 2215-2243, SEQ ID NO: 2457-3361, or SEQ ID NO: 5707-5731, or wherein the CGI factor motif comprises at least one of SEQ ID NO: 1921-1956, and wherein the nucleotide sequence of the at least one CGI factor, CGI factor precursor, CGI factor fragment, or CGI factor motif does not occur in the genome of the fungus.
   76. The method of embodiment 75, wherein the CGI factor, the CGI factor precursor, the CGI factor fragment, or the CGI factor motif is active and/or toxic.
   77. The method of embodiment 75 or embodiment 76, wherein the composition is provided to the fungus by directly contacting the fungus with the composition, or by delivering the composition to the environment of the fungus.
   78. A method of preventing growth of a fungus on a surface, comprising treating the surface with a composition comprising an effective amount of at least one conidial germination-inhibiting (CGI) factor, CGI factor precursor, CGI factor fragment, or CGI factor motif, wherein the CGI factor comprises an amino acid sequence that has at least 80% sequence identity with a sequence selected from the group consisting of SEQ ID NO: 961-1920, SEQ ID NO: 1957-2189, SEQ ID NO: 2194-2210, SEQ ID NO: 2215-2243, SEQ ID NO: 2457-3361, or SEQ ID NO: 5707-5731, or wherein the CGI factor motif comprises at least one of SEQ ID NO: 1921-1956.
   79. The method of embodiment 78, wherein the CGI factor, the CGI factor precursor, the CGI factor fragment, or the CGI factor motif is active and/or toxic.
   80. The method of 78 or embodiment 79, wherein the surface is a non-living surface or is the surface of a living organism.
   81. The method of any one of embodiments 78-80, wherein the nucleotide sequence of the at least one CGI factor, CGI factor precursor, CGI factor fragment, or CGI factor motif does not occur in the genome of the fungus.
   82. A composition having antifungal properties, comprising a substrate or matrix that is complexed with at least one conidial germination-inhibiting (CGI) factor, CGI factor precursor, CGI factor fragment, or CGI factor motif that is active and/or toxic, wherein the CGI factor comprises an amino acid sequence that has at least 80% sequence identity with a sequence selected from the group consisting of SEQ ID NO: 961-1920, SEQ ID NO: 1957-2189, SEQ ID NO: 2194-2210, SEQ ID NO: 2215-2243, SEQ ID NO: 2457-3361, or SEQ ID NO: 5707-5731, or wherein the CGI factor motif comprises at least one of SEQ ID NO: 1921-1956.
   83. The composition of embodiment 82, wherein the CGI factor, the CGI factor precursor, the CGI factor fragment, or the CGI factor motif is active and/or toxic.
   84. The composition of embodiment 82 or embodiment 83, wherein the complexation between the substrate or matrix with the at least one CGI factor, CGI factor precursor, CGI factor fragment, or CGI factor motif is through: (a) covalent bonding, (b) non-covalent bonding, or (c) a combination of (a) and (b).
   85. The composition of embodiment 84, wherein the substrate or matrix comprises polypeptides. 86. The composition of embodiment 84 or embodiment 85, wherein the substrate or matrix comprises self-assembling peptides.
   87. A method of treating a subject with a fungal disease comprising administering to a subject an antifungal or fungicidal composition comprising the CGI factor, the CGI factor precursor, the CGI factor fragment, or the CGI factor motif of embodiment 13 and a pharmaceutically acceptable carrier.
   88. The method of embodiment 87, wherein the subject is a mammal.
   89. The method of embodiment 88, wherein the mammal is a human.
   90. The method of embodiment 88, wherein the mammal is a domestic animal or livestock.
   91. The method of any one of embodiments 87-90, wherein the fungal disease is caused by a fungal pathogen selected from the group consisting of Aspergillus, Candida, Coccidioides, Histoplasma, Cryptococcus, Pneumocystis, and Blastomyces fungus.
   92. The method of any one of embodiments 87-91, wherein the fungal disease is aspergillosis, blastomycosis, candidiasis, coccidioidomycosis, histoplasmosis, mucormycosis, mycetoma, ringworm, sporotrichosis, paracoccidioidomycosis, talaromycosis, chromoblastomycosis fusariosis, emergomycosis, scedosporiosis, or fungal meningitis.
   93. The method of any one of embodiments 87-92, wherein the antifungal or fungicidal composition is administered intravenously, intramuscularly, subcutaneously, topically, orally, transdermally, intraperitoneally, intraorbitally, by implantation, by inhalation, intrathecally, intraventricularly, or intranasally.

### EXAMPLES

[0071] The presently disclosed subject matter will be better understood by reference to the following Examples, which are provided as exemplary of the invention, and not by way of limitation.

### Example 1

[0072] This example describes the design of a conidial germination-inhibiting (CGI) factor.

### Materials and Methods

[0073] A pUC plasmid was prepared for expression of CGI peptides. The plasmid contained a T7 LacOperator promoter (SEQ ID NO: 2245) for driving the transcription and translation of one or more CGI peptides. The T7 promoter was codon optimized for driving transcription and translation of the CGI peptides. The plasmid includes a linear polynucleotide sequence containing, from 5′ to 3′, a 5′ peptide secretion sequence, a N-terminus His-tag sequence SEQ ID NO: 2246), a protease cleavage site SEQ ID NO: 2247), and a CGI peptide sequence. The plasmid also contained a transcription termination sequence (SEQ ID NO: 2244).

### Example 2

[0074] This example describes the expression of a CGI factor in bacteria.

### Materials and Methods

[0075] E. coli (BL21 (DE3)) harboring a pUC plasmid containing the a CGI factor construct were cultured as previously described in Example 1. A single bacterial colony was inoculated in lysogeny broth (LB) medium to produce a starter culture. The starter culture was then placed in a shaker at 37° C. until the optical density at 600 nm (OD600) reached between 0.4-0.8. Afterwards, 40-400 μM isopropyl β-d-1-thiogalactopyranoside (IPTG) was used to induce the expression of the plasmid promoter overnight at 37° C.

### Example 3

[0076] This example describes the purification of a CGI factor.

### Materials and Methods

[0077] Purification of recombinant peptides was performed as previously described (Nallamsetty, S., and Waugh, D. S. (2007) Biochem Biophys Res Commun. 364 (3): 639-44)). The bacterial cell suspension was lysed using a homogenizer at 10,000-11,000 psi. Lysed cell suspensions were then centrifuged for 30 min at 15,000×g. Cell debris was filtered using a 0.45 mm polyethersulfone membrane before chromatography. The supernatant was then applied to nickel-nitrilotriacetic acid (Ni-NTA) resin column equilibrated in 50 mM sodium phosphate buffer (pH 7.7), 150 mM sodium chloride and 25 mM imidazole. The column was washed with equilibration buffer until a stable baseline was reached. The bound fusion protein was then eluted with a linear gradient over 10 column volumes into 50 mM sodium phosphate buffer (pH 7.7), 150 mM sodium chloride and 250 mM imidazole. Protein fractions were pooled, and the resulting sample was concentrated approximately tenfold. Any additional cell debris was precipitated by centrifuging at 5,000×g for 10 min. His6-TEV protease was then added to remove the protein tag from the fusion protein, and digested overnight at 41° C. Efficient cleavage was confirmed by SDS-PAGE gel analysis.

### Example 4

[0078] This example describes the design and validation of peptide inhibitors of fungal pathogens.

### Materials and Methods

### Conidial Germination-Inhibiting (CGI) Factors

[0079] To identify new compounds and targets to kill pathogenic fungi, a series of short peptides were designed based on fungal mating pheromones. The sequences for peptides 105-119 used in this study are SEQ ID NOs: 2196-2210, respectively. The peptides were expressed and purified as described in Examples 1-3.

### Conidial Germination Inhibition Colorimetric Assay

[0080] Biomass was generated by inoculating Fusarium or Botrytis spores into potato dextrose agar plates followed by incubation of the inoculated plates in sealed plastic boxes for seven days. After the incubation, the plates were flooded with 15 mL of sterile water, using a pipette to aspirate water over the mycelia and to cause the conidia to go into suspension. Then, 15 mL of the conidial suspension were transferred to a falcon tube and amended with 0.5% (w/v) D-glucose. Microconidia were quantified using a glass hemacytometer (Weber Scientific, Cat no. 3048-11). 10 μL of the microconidia suspension were transferred into the glass hemocytometer chamber underneath the coverslip. The number of conidia in each set of 16-corner squares of the hemocytometer were counted, and the average number of counts was multiplied by 10\hat{ }4 to obtain the number of conidia per mL in the original suspension.

[0081] For microconidia treatment, a 2 mM fenpiclonil (Millipore Sigma, Cat. no. 36532) solution stock solution was prepared using 50% (w/v) ethanol in water. The peptide solutions were prepared using 50% (w/v) ethanol in water. 96-well plates (VWR, Cat. no. 734-2781) were prepared by adding the treatment solution and microconidia to each well to obtain desired treatment concentration and 1×10\hat{ }6 conidia/mL in a final volume of 150 μL per well. Potato dextrose broth (PDB; Alpha Biosciences, Cat. no. P16-126) was used to adjust the volume. The plates were then covered and incubated at 30° C. for 18 hours and 200 rpm. Afterwards, 15 μL of Prestoblue cell viability reagent (Thermofisher Scientific, Cat no. A13262) was added to each well, and the plate was further incubated for 7 hours. Then, the fluorescence at 590 nm emission after excitation at 560 nm was recorded using a spectrophotometer (BioTek Synergy H1 Microplate Reader, Fischer Scientific, Cat. no. 11-120-533).

### Results

[0082] The peptides 105-119 (SEQ ID NOs: 2196-2210, respectively) were prepared and evaluated for their effect on fungal asexual reproduction. Untreated microconidia, and microconidia treated with 50% (w/v) ethanol in water were used as negative controls for the conidial germination inhibition assay, while the fungicide compound fenpiclonil was used as a positive control (FIG. 1A). FIG. 2A shows an exemplary layout of a 96-well plate as used in the conidial germination inhibition assay, while FIG. 2B shows the validation of the resazurin-based cell viability reagent used in this study.

[0083] Treatment of Fusarium or Botrytis conidia with the candidate CGI factors resulted in inhibition of conidial germination (FIG. 2A). This inhibition was concentration dependent (FIGS. 2B-2C). Peptide106, which is derived from a Botrytis pheromone, resulted in a decrease of Botrytis conidial germination (FIGS. 2D-2E). Peptide107, which is derived from a Saccharomyces cerevisiae pheromone, inhibited germination of both Botrytis and Fusarium conidia (FIGS. 2D-2E), with the strongest inhibition observed at 375 μM concentration (FIGS. 3 and 4).

### CONCLUSIONS

[0084] Fungal pheromones typically promote fungi growth. Here, it was demonstrated that peptides derived from fungal pheromones unexpectedly inhibited growth of Botrytis and Fusarium. Novel CGI factors based on fungal pheromones could be applied to controlling fungal infection of plants.

### Example 5

[0085] This example describes the antifungal activity of tandem CGI factors when applied to seeds.

### Materials and Methods

### Expression and Purification of Tandem CGI Factors

[0086] A plasmid vector is prepared for tandem CGI expression. The plasmid vector contains (from 5′ to 3′): a T7 LacOperator promoter (SEQ ID NO: 2245); a Shine-Delgarno sequence (SEQ ID NO: 2251); a linear polynucleotide sequence encoding a N-terminus His-tag sequence (SEQ ID NO: 2246); a TEV protease cleavage tag (SEQ ID NO: 2247); a first CGI peptide sequence; a P2A cleavage peptide (if not used in bacteria) or a Translation Initiation Region (TIR; if used in bacteria) (SEQ ID NO: 2252); a second CGI peptide sequence; and a T7 transcription termination sequence (SEQ ID NO: 2244).

[0087] E. coli (BL21 (DE3)) harboring the tandem CGI plasmid are prepared as described in Example 1, and the tandem GCI factor is expressed and purified as described in Examples 2-3.

### Seed Treatment Application

[0088] The first and second peptides are produced in stoichiometric and equimolar ratios before and upon purification. Corn or Tomato seeds are soaked in 10 mL of CGI peptide solution in a 50 mL conical tube and incubated on a shaker for 30 minutes. Coated seeds are left to dry overnight in a fume hood

### Results

[0089] Tandem CGI are prepared from the GCI factors corresponding to peptides 105-119 as described in Example 4. The tandem CGIs prepared in this study are SEQ ID NO: 1957, SEQ ID NO: 1958, SEQ ID NO: 1959, SEQ ID NO: 1960, SEQ ID NO: 1961, SEQ ID NO: 1962, SEQ ID NO: 1963, SEQ ID NO: 1964, SEQ ID NO: 1965, SEQ ID NO: 1966, SEQ ID NO: 1967, SEQ ID NO: 1968, SEQ ID NO: 1969, SEQ ID NO: 1970, SEQ ID NO: 1971, SEQ ID NO: 1972, SEQ ID NO: 1973, SEQ ID NO: 1974, SEQ ID NO: 1975, SEQ ID NO: 1976, SEQ ID NO: 1977, SEQ ID NO: 1978, SEQ ID NO: 1979, SEQ ID NO: 1980, SEQ ID NO: 1981, SEQ ID NO: 1982, SEQ ID NO: 1983, SEQ ID NO: 1984, SEQ ID NO: 1985, SEQ ID NO: 1986, SEQ ID NO: 1987, SEQ ID NO: 1988, SEQ ID NO: 1989, SEQ ID NO: 1990, SEQ ID NO: 1991, SEQ ID NO: 1992, SEQ ID NO: 1993, SEQ ID NO: 1994, SEQ ID NO: 1995, SEQ ID NO: 1996, SEQ ID NO: 1997, SEQ ID NO: 1998, SEQ ID NO: 1999, SEQ ID NO: 2000, SEQ ID NO: 2001, SEQ ID NO: 2002, SEQ ID NO: 2003, SEQ ID NO: 2004, SEQ ID NO: 2005, SEQ ID NO: 2006, SEQ ID NO: 2007, SEQ ID NO: 2008, SEQ ID NO: 2009, SEQ ID NO: 2010, SEQ ID NO: 2011, SEQ ID NO: 2012, SEQ ID NO: 2013, SEQ ID NO: 2014, SEQ ID NO: 2015, SEQ ID NO: 2016, SEQ ID NO: 2017, SEQ ID NO: 2018, SEQ ID NO: 2019, SEQ ID NO: 2020, SEQ ID NO: 2021, SEQ ID NO: 2022, SEQ ID NO: 2023, SEQ ID NO: 2024, SEQ ID NO: 2025, SEQ ID NO: 2026, SEQ ID NO: 2027, SEQ ID NO: 2028, SEQ ID NO: 2029, SEQ ID NO: 2030, SEQ ID NO: 2031, SEQ ID NO: 2032, SEQ ID NO: 2033, SEQ ID NO: 2034, SEQ ID NO: 2035, SEQ ID NO: 2036, SEQ ID NO: 2037, SEQ ID NO: 2038, SEQ ID NO: 2039, SEQ ID NO: 2040, SEQ ID NO: 2041, SEQ ID NO: 2042, SEQ ID NO: 2043, SEQ ID NO: 2044, SEQ ID NO: 2045, SEQ ID NO: 2046, SEQ ID NO: 2047, SEQ ID NO: 2048, SEQ ID NO: 2049, SEQ ID NO: 2050, SEQ ID NO: 2051, SEQ ID NO: 2052, SEQ ID NO: 2053, SEQ ID NO: 2054, SEQ ID NO: 2055, SEQ ID NO: 2056, SEQ ID NO: 2057, SEQ ID NO: 2058, SEQ ID NO: 2059, SEQ ID NO: 2060, SEQ ID NO: 2061, SEQ ID NO: 2062, SEQ ID NO: 2063, SEQ ID NO: 2064, SEQ ID NO: 2065, SEQ ID NO: 2066, SEQ ID NO: 2067, SEQ ID NO: 2068, SEQ ID NO: 2069, SEQ ID NO: 2070, SEQ ID NO: 2071, SEQ ID NO: 2072, SEQ ID NO: 2073, SEQ ID NO: 2074, SEQ ID NO: 2075, SEQ ID NO: 2076, SEQ ID NO: 2077, SEQ ID NO: 2078, SEQ ID NO: 2079, SEQ ID NO: 2080, SEQ ID NO: 2081, SEQ ID NO: 2082, SEQ ID NO: 2083, SEQ ID NO: 2084, SEQ ID NO: 2085, SEQ ID NO: 2086, SEQ ID NO: 2087, SEQ ID NO: 2088, SEQ ID NO: 2089, SEQ ID NO: 2090, SEQ ID NO: 2091, SEQ ID NO: 2092, SEQ ID NO: 2093, SEQ ID NO: 2094, SEQ ID NO: 2095, SEQ ID NO: 2096, SEQ ID NO: 2097, SEQ ID NO: 2098, SEQ ID NO: 2099, SEQ ID NO: 2100, SEQ ID NO: 2101, SEQ ID NO: 2102, SEQ ID NO: 2103, SEQ ID NO: 2104, SEQ ID NO: 2105, SEQ ID NO: 2106, SEQ ID NO: 2107, SEQ ID NO: 2108, SEQ ID NO: 2109, SEQ ID NO: 2110, SEQ ID NO: 2111, SEQ ID NO: 2112, SEQ ID NO: 2113, SEQ ID NO: 2114, SEQ ID NO: 2115, SEQ ID NO: 2116, SEQ ID NO: 2117, SEQ ID NO: 2118, SEQ ID NO: 2119, SEQ ID NO: 2120, SEQ ID NO: 2121, SEQ ID NO: 2122, SEQ ID NO: 2123, SEQ ID NO: 2124, SEQ ID NO: 2125, SEQ ID NO: 2126, SEQ ID NO: 2127, SEQ ID NO: 2128, SEQ ID NO: 2129, SEQ ID NO: 2130, SEQ ID NO: 2131, SEQ ID NO: 2132, SEQ ID NO: 2133, SEQ ID NO: 2134, SEQ ID NO: 2135, SEQ ID NO: 2136, SEQ ID NO: 2137, SEQ ID NO: 2138, SEQ ID NO: 2139, SEQ ID NO: 2140, SEQ ID NO: 2141, SEQ ID NO: 2142, SEQ ID NO: 2143, SEQ ID NO: 2144, SEQ ID NO: 2145, SEQ ID NO: 2146, SEQ ID NO: 2147, SEQ ID NO: 2148, SEQ ID NO: 2149, SEQ ID NO: 2150, SEQ ID NO: 2151, SEQ ID NO: 2152, SEQ ID NO: 2153, SEQ ID NO: 2154, SEQ ID NO: 2155, SEQ ID NO: 2156, SEQ ID NO: 2157, SEQ ID NO: 2158, SEQ ID NO: 2159, SEQ ID NO: 2160, SEQ ID NO: 2161, SEQ ID NO: 2162, SEQ ID NO: 2163, SEQ ID NO: 2164, SEQ ID NO: 2165, SEQ ID NO: 2166, SEQ ID NO: 2167, SEQ ID NO: 2168, SEQ ID NO: 2169, SEQ ID NO: 2170, SEQ ID NO: 2171, SEQ ID NO: 2172, SEQ ID NO: 2173, SEQ ID NO: 2174, SEQ ID NO: 2175, SEQ ID NO: 2176, SEQ ID NO: 2177, SEQ ID NO: 2178, SEQ ID NO: 2179, SEQ ID NO: 2180, and/or SEQ ID NO: 2181.

### Example 6

[0090] This example describes the antifungal activity of a single CGI peptide when applied to seeds.

### Materials and Methods

### Purification and Expression of a CGI Peptide

[0091] A CGI peptide plasmid is prepared. The plasmid contains (from 5′ to 3′): a T7 LacOperator promoter (SEQ ID NO: 2245); a Shine-Delgarno sequence (SEQ ID NO: 2251); a linear polynucleotide sequence encoding a N-terminus His-tag sequence SEQ ID NO: 2246), a TEV protease cleavage tag SEQ ID NO: 2247), and a peptide sequence; and a T7 transcription termination sequence SEQ ID NO: 2244).

[0092] E. coli (BL21 (DE3)) harboring the CGI peptide plasmid are prepared as described in Example 1, and the tandem CGI factor as expressed and purified as described in Examples 2-3.

### Seed Treatment Application

[0093] Corn or Tomato seeds are soaked in 10 mL of CGI peptide solution in a 50 mL conical tube and incubated on a shaker for 30 minutes. Coated seeds are left to dry overnight in a fume hood.

### Example 7

[0094] This example describes the delivery of a CGI factor to a seed.

### Materials and Methods

### Purification and Expression of CGI Factors

[0095] E. coli (BL21 (DE3)) harboring a pUC plasmid containing a CGI factor is produced and purified as described in Examples 1-3. The CGI factor is then formulated for use as a seed treatment or plantable composition. In addition to pesticidal minicells, the formulation can include other pesticides, surfactants, film-forming polymers, carriers, antifreeze agents, and/or formulary additives. When used together, these components provide a composition that is storage-stable and suitable for use in normal seed treatment equipment, such as slurry seed treaters, direct treaters, on-farm hopper-boxes, or planter-boxes.

[0096] For the seed treatment formulation, 40% of a CGI peptide is prepared in 3% EP/PO block co-polymer, tristyrylphenol, 0.5% ethoxylate, 5% calcium salt with pigment red, 0.2% silicone oil and water, and incubated with rice seeds overnight under a negative flow laboratory hood.

[0097] Formulated versus unformulated rice seeds are then analyzed to determine the percent coverage for fungal growth.

### Example 8

[0098] This example describes the application of CGI factors to a post-harvest crop.

### Materials and Methods

[0099] Strawberries are obtained and sorted based on size. Fruits of the smallest size are surface sterilized by submersion in 70% ethanol for 1 minute. The fruits are then triple-rinsed with water, and the excess moisture is removed prior to application of the CGI factors.

[0100] For CGI factor application, the treatment solutions (CGI and controls) are prepared. For each treatment condition, six strawberries are arranged on a petri dish and placed in a fume hood. Each strawberry is sprayed with 2 mL of the treatment solution, covering the entire fruit, including the hull. Alternatively, the fruits are submerged one-by-one in the treatment solution. Treated fruit are then left to dry on a fume hood for 15 minutes.

[0101] Following treatment of the strawberries, a conidial suspension is prepared by flooding a 7-day-old Botrytis plate with 10 mL water. The solution is then pipetted into a tube, and 50 mg D-glucose is added. The treated strawberries are transferred to a new petri dish in a plastic container, and 3 mL of the conidial suspension is added to each petri dish, gently rolling the strawberries to spread the suspension on the surface of the fruit. The plastic containers are then covered and incubated at room temperature for 7 days. At the end of the incubation period, the strawberries are evaluated to determine efficacy of the treatment solutions as compared to an untreated control sample.

### Results

[0102] Organic strawberries are at risk of fungal infection at any point after harvest. Wounding can occur during delivery or packaging, which increases the fruit's susceptibility to fungal pathogens. Additionally, tightly packaged strawberries are under a constant load, and experience varying temperatures when transported between field, grocery stores, and a consumer's home. Due to the highly perishable nature of this fruit, there is significant loss in quantity and quality of organic strawberries post-harvest.

[0103] To address this issue, CGI factors are applied, by either spray or immersion treatment, to healthy strawberries before packaging to prevent fungal infection. The CGI factors will remain present on the fruit to inhibit spore germination until optionally washed off by a consumer.

### Example 9

[0104] This example describes the design and validation of peptide inhibitors of fungal pathogens.

### Materials and Methods

### Conidial Germination-Inhibiting (CGI) Factors

[0105] To identify new compounds and targets to kill pathogenic fungi, a series of short peptides including SEQ ID NO: 2196, SEQ ID NO: 2197, SEQ ID NO: 2198, SEQ ID NO: 2199, SEQ ID NO: 2200, SEQ ID NO: 2201, SEQ ID NO: 2202, SEQ ID NO: 2203, SEQ ID NO: 2204, SEQ ID NO: 2205, SEQ ID NO: 2206, SEQ ID NO: 2207, SEQ ID NO: 2208, SEQ ID NO: 2209, SEQ ID NO: 2210, SEQ ID NO: 2211, SEQ ID NO: 2212, SEQ ID NO: 2213, and SEQ ID NO: 2214 were designed based on fungal mating pheromones (Table 1). The peptides included peptides modified by addition of glycine residues at either the N terminus or the C terminus, or that were tandem copies, optionally separated by one or more amino acids (e.g., a linker segment, such as multiple glycine residues). The peptides were expressed and purified as described in Examples 1-3.

TABLE 1
Short peptides designed based on fungal mating pheromones.

| | | SEQ ID |
|---|---|---|
| Description | Sequence | NO: |
| F. graminearum Alpha-pheromone | WCTWKGQPCW | 2182 |
| B. cinerea Alpha-pheromone | WCGRPGQPC | 2183 |
| S. cerevisiae Alpha-pheromone | WHWLQLKPGQPMY | 2184 |
| F. graminearum Alpha-pheromone 2 | TWQKCWWPGC | 2199 |
| F. graminearum Alpha-pheromone 3 | PKWTWQGCCW | 2200 |
| F. graminearum Alpha-pheromone 4 | QTWWPGCKWC | 2201 |
| F. graminearum Alpha-pheromone 5 | TQWCWWGKCP | 2202 |
| B. cinerea Alpha-pheromone 2 | CPWCQGGRP | 2203 |
| B. cinerea Alpha-pheromone 3 | PGPCWRGCQ | 2204 |
| B. cinerea Alpha-pheromone 4 | GWQCRPPCG | 2205 |
| B. cinerea Alpha-pheromone 5 | CGQRGPPCW | 2206 |
| S. cerevisiae Alpha-pheromone 2 | WKMGQYHQLPPLW | 2207 |
| S. cerevisiae Alpha-pheromone 3 | MYGKPHLWQLQWP | 2208 |
| S. cerevisiae Alpha-pheromone 4 | QMWPGPWHKQYLL | 2209 |
| S. cerevisiae Alpha-pheromone 5 | PGQMKWPHWLLYQ | 2210 |
| S. cerevisiae Alpha-pheromone 6 (pep-gly) | WHWLQLKPGQPMYG | 2186 |
| S. cerevisiae Alpha-pheromone 7 (gly-pep) | GWHWLQLKPGQPMY | 2187 |
| S. cerevisiae Alpha-pheromone 8 (pep-pep) | WHWLQLKPGQPMYWHWLQ | 2188 |
| | LKPGQPMY | |
| S. cerevisiae Alpha-Pheromone 9 | WHWLQLKPGQPMYGGGGS | 2189 |
| (pep-GGGG-pep) | WHWLQLKPGQPMY | |

### Fusarium Viability Colorimetric Assay

[0106] A Fusarium conidial suspension was prepared from a 7-day culture of Fusarium biomass grown on potato dextrose agar for 7 days, and quantified by hemocytometer, as described in Example 4. Solutions of fenpiclonil (Millipore Sigma, Cat. no. 36532) and of the individual peptides were prepared in 50% (w/v) ethanol in water, and tested using a PrestoBlue™ (resazurin) viability colorimetric assay as described in Example 4.

[0107] The Fusarium conidial suspension, peptide or control treatment solution, and potato dextrose broth (Alpha Biosciences, catalogue no. P16-126) were added to each well of a 96-well plate to obtain the desired treatment concentration and 1×10\hat{ }6 conidia/mL in a final volume of 150 microliters per well. The plates were covered and incubated at 30° C. for 18 hours and 200 rpm. Fifteen microliters of PrestoBlue™ Cell Viability Reagent (Thermofisher Scientific, Cat no. A13262) were added to each well, and the plate was further incubated before measuring fluorescence at 590 nm emission with excitation at 560 nm using a spectrophotometer (BioTek Synergy H1 Microplate Reader, Fischer Scientific, Cat. no. 11-120-533).

### Botrytis Viability Colorimetric Assay

[0108] A Botrytis conidial suspension was prepared from a 7-day culture of Botrytis cinarea (strain CBS 261.71) biomass grown on potato dextrose agar for 7 days, and quantified by hemocytometer, as described in Example 4. Solutions of fenpiclonil (Millipore Sigma, Cat. no. 36532) and of the individual peptides were prepared in 50% (w/v) ethanol in water, and tested using a PrestoBlue™ (resazurin) viability colorimetric assay as described in Example 4.

[0109] The Botrytis conidial suspension, peptide or control treatment solution, and potato dextrose broth (Alpha Biosciences, catalogue no. P16-126) were added to each well of a 96-well plate to obtain the desired treatment concentration and 1×10\hat{ }6 conidia/mL in a final volume of 150 microliters per well. The plates were covered and incubated at 30° C. for 24 hours and 200 rpm. Fifteen microliters of PrestoBlue™ Cell Viability Reagent (Thermofisher Scientific, Cat no. A13262) were added to each well, and the plate was further incubated for another hour before measuring fluorescence at 590 nm emission with excitation at 560 nm using a spectrophotometer (BioTek Synergy H1 Microplate Reader, Fischer Scientific, Cat. no. 11-120-533).

### Results

### Fusarium Viability Colorimetric Assay

[0110] Multiple separate Fusarium viability experiments were run. In the first experiment, the peptides tested for the ability to inhibit conidial germination and/or decrease fungal cell viability included the native alpha pheromones from Fusarium sp. (WCTWKGQPCW, SEQ ID NO: 2182), Botrytis sp. (WCGRPGQPC, SEQ ID NO: 2183), and Saccharomyces cerevisiae (WHWLQLKPGQPMY, SEQ ID NO: 2184), as well as a synthetic peptide having the amino acid sequence WKMGQYHQLPPLW (SEQ ID NO: 2185), which is based on a rearrangement of the amino acid sequence of the Saccharomyces cerevisiae alpha pheromone) and a modified Saccharomyces cerevisiae alpha pheromone with a C-terminus glycine cap that has the amino acid sequence WHWLQLKPGQPMYG (SEQ ID NO: 2186). Results are shown in FIG. 6A. All of the CGI peptides tested demonstrated an ability at a concentration of 375 micromolar to reduce Fusarium cell viability in the treated samples, in comparison to the samples that were untreated or treated only with the 50% (w/v) ethanol in water carrier solution. Notably, in this experiment, the Saccharomyces cerevisiae alpha pheromone (SEQ ID NO: 2184) as well as the synthetic peptide (SEQ ID NO: 2185) and the C-terminus glycine-capped Saccharomyces cerevisiae alpha pheromone (SEQ ID NO: 2186) greatly decreased Fusarium cell viability to about the same level as did the positive control (fenpiclonil) fungicidal treatment. These results demonstrated that an alpha pheromone encoded in the genome of one fungal genus (Saccharomyces) and its derivatives were unexpectedly effective in reducing viability of cells of a different fungal genus (Fusarium).

[0111] In a second experiment carried out similarly to the first, the same peptides were again tested at a concentration of 375 micromolar; viability was measured at a later timepoint (51 hours after addition of the resazurin). Results are shown in FIG. 6B. Similar results were observed, with the Fusarium alpha pheromone (SEQ ID NO: 2182) and Botrytis alpha pheromone (SEQ ID NO: 2183) again decreasing Fusarium cell viability, in comparison to the samples that were untreated or treated only with the 50% (w/v) ethanol in water carrier solution. Notably, the Saccharomyces cerevisiae alpha pheromone (SEQ ID NO: 2184) and synthetic peptide (SEQ ID NO: 2185) again greatly decreased Fusarium cell viability to about the same level as did the positive control (fenpiclonil) fungicidal treatment. These results confirmed that an alpha pheromone encoded in the genome of one fungal genus (Saccharomyces) and its derivatives were unexpectedly effective in reducing viability of cells of a different fungal genus (Fusarium).

[0112] In a third experiment run similarly to the first and second, eight putative conidial germination-inhibiting peptides were tested at 175 micromolar and at 375 micromolar. The tested peptides again included the native alpha pheromones from Fusarium sp. (WCTWKGQPCW, SEQ ID NO: 2182), Botrytis sp. (WCGRPGQPC, SEQ ID NO: 2183), and Saccharomyces cerevisiae (WHWLQLKPGQPMY, SEQ ID NO: 2184), the synthetic peptide (SEQ ID NO: 2185) and the C-terminus glycine-capped Saccharomyces cerevisiae alpha pheromone (SEQ ID NO: 2186), as well as three peptides not previously tested: a modified Saccharomyces cerevisiae alpha pheromone with a N-terminus glycine cap (GWHWLQLKPGQPMY, SEQ ID NO: 2187), a peptide having the sequence of contiguous tandem copies of the Saccharomyces cerevisiae alpha pheromone (WHWLQLKPGQPMYWHWLQLKPGQPMY, SEQ ID NO: 2188), and a peptide having the sequence of tandem copies of the Saccharomyces cerevisiae alpha pheromone separated by a four-glycine linking segment (WHWLQLKPGQPMYGGGGSWHWLQLKPGQPMY, SEQ ID NO: 2189). Results are shown in FIG. 6C. The observed results were similar to those obtained in the first and second experiments. At a concentration of 375 micromolar, the Fusarium alpha pheromone (SEQ ID NO: 2182) and Botrytis alpha pheromone (SEQ ID NO: 2183) again decreased Fusarium cell viability, in comparison to the samples that were untreated or treated only with the 50% (w/v) ethanol in water carrier solution; at the lower concentration of 175 micromolar, this effect was less pronounced. At 375 micromolar, the Saccharomyces cerevisiae alpha pheromone (SEQ ID NO: 2184) and its derivatives (SEQ ID NO: 2188 and 2189) again greatly decreased Fusarium cell viability to about the same level as did the positive control (fenpiclonil) fungicidal treatment, but at 175 micromolar showed no significant effects on Fusarium cell viability, Notably, the longer Saccharomyces cerevisiae alpha pheromone-derived tandem peptides (tandem copies without a spacer, SEQ ID NO: 2188) and (tandem copies with a spacer, SEQ ID NO: 2189) were effective at both 175 micromolar and 375 micromolar in reducing Fusarium cell viability to about the same level as did the positive control (fenpiclonil) fungicidal treatment.

[0113] Experiments 4 and 5 were performed following similar protocols and with the same CGI peptides as in the third experiment. Results from these experiments are provided as mean percent inhibition and deviation from the mean (four replicates) in Table 2.

TABLE 2
Results of Fusarium viability colorimetric
assay experiments four and five.

| | Percent Inhibition (Fusarium) | | | |
|---|---|---|---|---|
| | Experiment 4 | | Experiment 5 | |
| Treatment | Mean | σM | Mean | σM |
| Ethanol | −0.42 | 0.94 | −36.51 | 6.53 |
| Fenpiclonil | 82.25 | 0.66 | 79.19 | 0.21 |
| WCTWKGQPCW | 47.78 | 0.62 | 28.39 | 2.43 |
| (SEQ ID NO: 2182) | | | | |
| WCGRPGQPC | 46.67 | 0.62 | 42.81 | 1.88 |
| (SEQ ID NO: 2183) | | | | |
| WHWLQLKPGQPMY | 66.33 | 1.73 | 62.01 | 3.41 |
| (SEQ ID NO: 2184) | | | | |
| WKMGQYHQLPPLW | 70.84 | 1.70 | 69.60 | 0.42 |
| (SEQ ID NO: 2185) | | | | |
| WHWLQLKPGQPMYG | 64.21 | 1.87 | 66.45 | 0.24 |
| (SEQ ID NO: 2186) | | | | |
| GWHWLQLKPGQPMY | (not | | 66.96 | 0.46 |
| (SEQ ID NO: 2187) | tested) | | | |
| WHWLQLKPGQPMYW | | | 71.82 | 1.05 |
| HWLQLKPGQPMY | | | | |
| (SEQ ID NO: 2188) | | | | |
| WHWLQLKPGQPMYGGG | | | 79.77 | 0.38 |
| GSWHWLQLKPGQPMY | | | | |
| (SEQ ID NO: 2189) | | | | |

### Botrytis Viability Colorimetric Assay

[0114] Results are provided as mean percent inhibition and deviation from the mean (four replicates) in Table 3. The results were generally similar to those observed in the Fusarium viability assay. At a concentration of 375 micromolar, the Fusarium alpha pheromone (SEQ ID NO: 2182) and Saccharomyces cerevisiae alpha pheromone (SEQ ID NO: 2184) decreased Botrytis cell viability, in comparison to the samples that were untreated or treated only with the 50% (w/v) ethanol in water carrier solution. In this experiment, treatment with the Saccharomyces cerevisiae alpha pheromone (SEQ ID NO: 2184) and its derivatives (SEQ ID NO: 2188 and 2189) decreased Fusarium cell viability by roughly about two-thirds of the viability decrease obtained using the positive control (fenpiclonil) fungicidal treatment. As had been observed in the Fusarium viability experiments, at 375 micromolar, the longer Saccharomyces cerevisiae alpha pheromone-derived tandem peptides (tandem copies without a spacer, SEQ ID NO: 2188) and (tandem copies with a spacer, SEQ ID NO: 2189) were the most effective peptides tested, reducing Botrytis cell viability as well as did the fenpiclonil treatment. These results confirmed that an alpha pheromone encoded in the genome of one fungal genus (Saccharomyces) and its derivatives were unexpectedly effective in reducing viability of cells of a different fungal genus (Botrytis).

TABLE 3
Results of Botrytis viability
colorimetric assay.

| | Percent Inhibition | |
|---|---|---|
| | (Botrytis) | |
| Treatment | Mean | σM |
| Ethanol | −83.17 | 6.92 |
| Fenpiclonil | 75.80 | 0.51 |
| WCTWKGQPCW | 8.56 | 5.25 |
| (SEQ ID NO: 2182) | | |
| WCGRPGQPC | −22.63 | 3.85 |
| (SEQ ID NO: 2183) | | |
| WHWLQLKPGQPMY | 45.14 | 0.84 |
| (SEQ ID NO: 2184) | | |
| WKMGQYHQLPPLW | 52.30 | 0.59 |
| (SEQ ID NO: 2185) | | |
| WHWLQLKPGQPMYG | 47.30 | 0.46 |
| (SEQ ID NO: 2186) | | |
| GWHWLQLKPGQPMY | 66.96 | 53.93 |
| (SEQ ID NO: 2187) | | |
| WHWLQLKPGQPMYWHWLQLKPG | 71.82 | 74.73 |
| QPMY (SEQ ID NO: 2188) | | |
| WHWLQLKPGQPMYGGGGSWHWL | 79.77 | 78.04 |
| QLKPGQPMY | | |
| (SEQ ID NO: 2189) | | |

### Example 10

[0115] This example describes novel synthetic peptide inhibitors of fungal growth or viability, or of conidial germination. More specifically, this example describes examples of synthetic peptides that are designed to inhibit conidial germination, and/or to decrease cell viability, of fungi.

[0116] An embodiment of these synthetic peptides is a synthetic peptide that includes an amino acid sequence including the sequences at least two different CGI peptides (e.g., alpha pheromone peptides from different source organisms or encoded in different source genomes, or derivatives of these alpha pheromone peptides), optionally further including additional amino acids, such as amino acids forming a spacer or linker sequence.

[0117] Another embodiment of these synthetic peptides is a synthetic peptide that includes sequence of, or derived from, at least one CGI peptide, fused to a signal peptide functional in the cell in which the synthetic peptide is to be expressed. Many signal peptide sequences have been described, for example, the Tat (Twin-arginine translocation) signal sequence is typically an N-terminal peptide sequence containing a consensus SRRxFLK “twin-arginine” motif, which serves to translocate a folded protein containing such a Tat signal peptide across a lipid bilayer. See also, e.g., the Signal Peptide Database publicly available at www[dot]signalpeptide[dot]de. For example, a synthetic peptide including a CGI peptide sequence fused to a bacterial signal peptide functional in a plant cell can be expressed in a plant cell or plant. See, e.g., the bacterial signal peptide with the sequence MVKVKCYVLFTALLSSLCAYG (SEQ ID NO: 2195), Moeller (2019) J. Exp. Bot., 60:3337-3335; doi:10.1093/jxb/erp167. Signal peptides are also useful for directing a protein to specific organelles; see, e.g., the experimentally determined and computationally predicted signal peptides disclosed in the Spdb signal peptide database, publicly available at proline[dot]bic[dot]nus[dot]edu[dot]sg/spdb.

[0118] Another embodiment of these synthetic peptides is a synthetic peptide that includes sequence of, or derived from, at least one CGI peptide, fused to a cell-penetrating peptide (CPP). Hundreds of CPP sequences have been described; see, e.g., the database of cell-penetrating peptides, CPPsite, publicly available at crdd[dot]osdd[dot]net/raghava/cppsite/. An example of a commonly used CPP sequence is a poly-arginine sequence, e.g., octoarginine or nonoarginine, which can be fused to the C-terminus of the CGI peptide.

[0119] Another embodiment of these synthetic peptides is a synthetic peptide that includes sequence of, or derived from, at least one CGI peptide, fused or complexed to a self-assembling peptide. In some embodiments, the self-assembling peptide is (M)(YEYK)ₙYEY (SEQ ID NO: 2194), where n=3 or n is between 3-10, and where methionine is the terminal and optional amino acid, and wherein the self-assembling peptide is covalently or non-covalently linked to one or more CGI peptides; see, e.g. Miki et al. (2021) Nature Communications, 21:3412, DOI: 10.1038/s41467-021-23794-6. In embodiments, a self-assembling peptide is fused to the CGI peptide's N-terminus, or to an internal site (e.g., at a linker peptide sequence connecting two CGI peptides). In embodiments, self-assembling peptide/CGI fusions or complexes form particles or structures (e.g., gels or sheets or fibres) having antifungal properties, and can be formulated (e.g., as paints, coatings, films, fabrics, etc.) and applied to protect a living or non-living substrate or matrix (e.g., a plant tissue surface, a seed, harvested plant parts, foodstuff, wood, plaster, inorganic building material) from fungal infestation or growth or damage.

[0120] Combinations of the above embodiments are also envisioned. For example, a synthetic peptide inhibitor of fungal growth or viability can include copies of two or more different CGI peptides (e.g., alpha pheromone peptides from different source organisms or encoded in different source genomes, or derivatives of these alpha pheromone peptides), wherein the CGI peptides are linked with an amino acid linking sequence (e.g., glycine residues) and wherein a poly-arginine CPP sequence is fused to the C-terminus of the synthetic peptide. Embodiments of these synthetic peptides optionally further include additional amino acids, such as amino acids forming a spacer or linker sequence, or that are located adjacent to the alpha pheromone sequence (e.g., a “cap” of one or more amino acids at the N-terminus or C-terminus of an individual alpha pheromone sequence or of the peptide molecule as a whole).

[0121] Non-limiting examples of these synthetic peptides are provided in Table 4.

TABLE 4
Examples of synthetic peptides.

| Amino acid sequence | Description |
|---|---|
| WHWLQLKPGQPMYWCTWKGQPCW (SEQ ID NO: | Saccharomyces cerevisiae |
| 2231) | alpha pheromone and |
| | Fusarium graminearum alpha |
| | pheromone, fused in tandem |
| | with no linker |
| WHWLQLKPGQPMYGGGGWCTWKGQPCW (SEQ ID | Saccharomyces cerevisiae |
| NO: 2232) | alpha pheromone and |
| | Fusarium graminearum alpha |
| | pheromone, fused in tandem |
| | with a four-glycine linker |
| WCTWKGQPCWWHWLQLKPGQPMY (SEQ ID NO: | Fusarium graminearum alpha |
| 2233) | pheromone and |
| | Saccharomyces cerevisiae |
| | alpha pheromone, fused in |
| | tandem with no linker |
| WCTWKGQPCWGGGGWHWLQLKPGQPMY (SEQ ID | Fusarium graminearum alpha |
| NO: 2234) | pheromone and |
| | Saccharomyces cerevisiae |
| | alpha pheromone, fused in |
| | tandem with a four-glycine |
| | linker |
| WHWLQLKPGQPMYWCGRPGQPC (SEQ ID NO: 2235) | Saccharomyces cerevisiae |
| | alpha pheromone and Botrytis |
| | cinerea alpha pheromone, |
| | fused in tandem with no linker |
| WHWLQLKPGQPMYGGGGWCGRPGQPC (SEQ ID NO: | Saccharomyces cerevisiae |
| 2236) | alpha pheromone and Botrytis |
| | cinerea alpha pheromone, |
| | fused in tandem with a four- |
| | glycine linker |
| WCTWKGQPCWWCGRPGQPC (SEQ ID NO: 2237) | Fusarium graminearum alpha |
| | pheromone and Botrytis |
| | cinerea alpha pheromone, |
| | fused in tandem with no linker |
| WCTWKGQPCWGGGGWCGRPGQPC (SEQ ID NO: 2238) | Fusarium graminearum alpha |
| | pheromone and Botrytis |
| | cinerea alpha pheromone, |
| | fused in tandem with a four- |
| | glycine linker |
| MVKVKCYVLFTALLSSLCAYGWHWLQLKPGQPMY | E. coli signal peptide |
| (SEQ ID NO: 2239) | (functional in plant cells) |
| | fused to N-terminus of |
| | Saccharomyces cerevisiae |
| | alpha pheromone |
| WHWLQLKPGQPMYRRRRRRRR (SEQ ID NO: 2240) | Saccharomyces cerevisiae |
| | alpha pheromone fused at its |
| | C-terminus to an octoarginine |
| | CPP sequence |
| YEYKYEYKYEYKYEYWHWLQLKPGQPMY (SEQ ID | Y15 self-assembling peptide |
| NO: 2241) | fused to N-terminus of |
| | Saccharomyces cerevisiae |
| | alpha pheromone |
| MYEYKYEYKYEYKYEYWHWLQLKPGQPMY (SEQ ID | Y15 self-assembling peptide |
| NO: 2242) | (including optional N-terminal |
| | methionine) fused to N- |
| | terminus of Saccharomyces |
| | cerevisiae alpha pheromone |
| WHWLQLKPGQPMYGGGGWCTWKGQPCWRRRRRRRR | Saccharomyces cerevisiae |
| (SEQ ID NO: 2243) | alpha pheromone and |
| | Fusarium graminearum alpha |
| | pheromone, fused in tandem |
| | with a four-glycine linker, and |
| | additionally having an |
| | octoarginine CPP sequence at |
| | the C-terminus |

### Example 11

[0122] This example describes novel synthetic fusion peptides which include at least one signal peptide and at least one CGI peptide. In embodiments, one or more amino acid linkers is included in the fusion peptide, e.g., linking a signal peptide to an adjacent CGI peptide, or in fusion peptides containing more than one CGI peptide, linking one CGI peptide to another. For economy, the amino acid linkers are relatively short, e.g., ten amino acids or fewer. In embodiments, the signal peptide is cleaved from the CGI peptide in vivo. These fusion peptide sequences are useful, e.g., for expression of the fusion peptide or of the CGI peptide in a eukaryotic cell, such as a plant cell. Related embodiments include eukaryotic cells and eukaryotic organisms (e.g., plant cells or tissues or intact plants) that transiently or stably express one or more CGI peptides or CGI peptide derivatives, such as these synthetic fusion peptides. These synthetic fusion peptides are useful for inhibiting conidial germination, and/or to decrease cell viability, of fungi.

[0123] Table 5 provides non-limiting examples of synthetic fusion peptides including at least one signal peptide and at least one CGI peptide, optionally including one or more amino acid linkers. These fusion peptides include various combinations of at least one CGI peptide with the PRI signal sequence MGFVLFSQLPSFLLVSTLLLFLVISHSCRA (SEQ ID NO: 5699) or with the GRP signal sequence MATTKHLALAILVLLSIGMTTSA (SEQ ID NO: 5700), and optionally, further include amino acid linkers of between 1 to 9 amino acids (shown as underlined text in Table 5).

TABLE 5
Examples of synthetic fusion peptides including at least one signal
peptide and at least one CGI peptide.

| SEQ ID | | | |
|---|---|---|---|
| NO: | Description | Linker Sequence | |
| | PR1 signal peptide | QNSQQD | MGFVLFSQLPSFLLVSTLLLFLVISHSC |
| | fused to | (SEQ ID NO: | RAQNSQQDWHWLQLKPGQPMY |
| | S. cerevisiae | 5701) | (SEQ ID NO: 5707) |
| | alpha | | |
| | pheromone | | |
| | | QNSQQ (SEQ ID NO: | MGFVLFSQLPSFLLVSTLLLFLVISHSC |
| | | 5702) | RAQNSQQWHWLQLKPGQPMY (SEQ |
| | | | ID NO: 5708) |
| | | QNSQ (SEQ ID NO: | MGFVLFSQLPSFLLVSTLLLFLVISHSC |
| | | 5703) | RAQNSQWHWLQLKPGQPMY (SEQ ID |
| | | | NO: 5709) |
| | | | MGFVLFSQLPSFLLVSTLLLFLVISHSC |
| | | | RAWHWLQLKPGQPMY (SEQ ID NO: |
| | | | 5710) |
| | PR1 signal peptide | QNS | MGFVLFSQLPSFLLVSTLLLFLVISHSC |
| | fused to | | RAQNSWHWLQLKPGQPMYWHWLQ |
| | S. cerevisiae | | LKPGQPMY (SEQ ID NO: 5711) |
| | alpha | | |
| | pheromone | | |
| | heterodimer (no | | |
| | linker) | | |
| | | QN | MGFVLFSQLPSFLLVSTLLLFLVISHSC |
| | | | RAQNWHWLQLKPGQPMYWHWLQL |
| | | | KPGQPMY (SEQ ID NO: 5712) |
| | | Q | MGFVLFSQLPSFLLVSTLLLFLVISHSC |
| | | | RAQWHWLQLKPGQPMYWHWLQLK |
| | | | PGQPMY (SEQ ID NO: 5713) |
| | | | MGFVLFSQLPSFLLVSTLLLFLVISHSC |
| | | | RAWHWLQLKPGQPMYWHWLQLKP |
| | | | GQPMY (SEQ ID NO: 5714) |
| | PR1 signal peptide | Q | MGFVLFSQLPSFLLVSTLLLFLVISHSC |
| | fused to | | RAQWHWLQLKPGQPMYGGGGSWH |
| | S. cerevisiae | | WLQLKPGQPMY (SEQ ID NO: 5715) |
| | alpha | | |
| | pheromone | | |
| | heterodimer | | |
| | (glycine linker) | | |
| | | | MGFVLFSQLPSFLLVSTLLLFLVISHSC |
| | | | RAWHWLQLKPGQPMYGGGGSWHW |
| | | | LQLKPGQPMY (SEQ ID NO: 5716) |
| | PR1 signal peptide | QNSQQDYLD (SEQ ID | MGFVLFSQLPSFLLVSTLLLFLVISHSC |
| | fused to | NO: 5704) | RAQNSQQDYLDWHWLQLKPGQPMY |
| | S. cerevisiae alpha | | RRRRRRRR (SEQ ID NO: 5717) |
| | pheromone fused to | | |
| | octoarginine | | |
| | | QNSQQDY (SEQ ID | MGFVLFSQLPSFLLVSTLLLFLVISHSC |
| | | NO: 5705) | RAQNSQQDYWHWLQLKPGQPMYRR |
| | | | RRRRRR (SEQ ID NO: 5718) |
| | | QNSQQD (SEQ ID NO: | MGFVLFSQLPSFLLVSTLLLFLVISHSC |
| | | 5701) | RAQNSQQDWHWLQLKPGQPMYRRR |
| | | | RRRRR (SEQ ID NO: 5719) |
| | | | MGFVLFSQLPSFLLVSTLLLFLVISHSC |
| | | | RAWHWLQLKPGQPMYRRRRRRRR |
| | | | (SEQ ID NO: 5720) |
| | GRP signal peptide | RTLLD (SEQ ID NO: | MATTKHLALAILVLLSIGMTTSARTLL |
| | fused to | 5706) | DWHWLQLKPGQPMY (SEQ ID NO: |
| | S. cerevisiae alpha | | 5721) |
| | pheromone | | |
| | | RT | MATTKHLALAILVLLSIGMTTSARTW |
| | | | HWLQLKPGQPMY (SEQ ID NO: 5722) |
| | | R | MATTKHLALAILVLLSIGMTTSARWH |
| | | | WLQLKPGQPMY (SEQ ID NO: 5723) |
| | | | MATTKHLALAILVLLSIGMTTSAWH |
| | | | WLQLKPGQPMY (SEQ ID NO: 5724) |
| | GRP signal peptide | R | MATTKHLALAILVLLSIGMTTSARWH |
| | fused to S. | | WLQLKPGQPMYWHWLQLKPGQPMY |
| | cerevisiae alpha | | (SEQ ID NO: 5725) |
| | pheromone | | |
| | heterodimer (no | | |
| | linker) | | |
| | | | MATTKHLALAILVLLSIGMTTSAWH |
| | | | WLQLKPGQPMYWHWLQLKPGQPMY |
| | | | (SEQ ID NO: 5726) |
| | GRP signal peptide | R | MATTKHLALAILVLLSIGMTTSARWH |
| | fused to S. | | WLQLKPGQPMYGGGGSWHWLQLKP |
| | cerevisiae alpha | | GQPMY (SEQ ID NO: 5727) |
| | pheromone | | |
| | heterodimer | | |
| | (glycine linker) | | |
| | | | MATTKHLALAILVLLSIGMTTSAWH |
| | | | WLQLKPGQPMYGGGGSWHWLQLKP |
| | | | GQPMY (SEQ ID NO: 5728) |
| | GRP signal peptide | RT | MATTKHLALAILVLLSIGMTTSARTW |
| | fused to S. | | HWLQLKPGQPMYRRRRRRRR (SEQ |
| | cerevisiae alpha | | ID NO: 5729) |
| | pheromone fused to | | |
| | octoarginine | | |
| | | R | MATTKHLALAILVLLSIGMTTSARWH |
| | | | WLQLKPGQPMYRRRRRRRR (SEQ ID |
| | | | NO: 5730) |
| | | | MATTKHLALAILVLLSIGMTTSAWH |
| | | | WLQLKPGQPMYRRRRRRRR (SEQ ID |
| | | | NO: 5731) |

### Example 12

[0124] This example describes identification of conidial germination-inhibiting (CGI) factor sequences.

[0125] Additional conidial germination-inhibiting (CGI) factor sequences were identified from ascomycete fungi and the CGI factor amino acid sequences are provided here as SEQ ID NOs: 2457-3361. In addition, at least one corresponding genomic DNA sequence was identified for each of the CGI factors, and are provided as SEQ ID NOs: 3362-5698. The ascomycete fungal genomes included genomes of fungal species known to be pathogenic to animals, e.g., invertebrates (such as arthropods, nematodes, annelids, helminths, molluscs) and vertebrates (such as mammals, birds, cartilaginous or bony fish, reptiles, or amphibians). In some embodiments, the fungal genome is of a fungal species that is pathogenic in birds, for example, domesticated poultry and waterfowl. In some embodiments, the fungal genome is of a fungal species that is pathogenic in mammals, for example, domestic mammals (dogs, cats, domestic ungulates, and lagomorphs), non-human primates, or humans. In certain embodiments, the fungal genome is of a fungal species that is pathogenic in humans, including adults and non-adults (infants and children).

TABLE 6
Additional CGI factor sequences

| | | Amino acid | Genomic DNA SEQ IN NO | | | | | | | | | | | | | | | |
|---|---|---|---|---|---|---|---|---|---|---|---|---|---|---|---|---|---|---|
| Organism Name | GenBank ID | SEQ ID | 1 | 2 | 3 | 4 | 5 | 6 | 7 | 8 | 9 | 10 | 11 | 12 | 13 | 14 | 15 | 16 |
| Aaosphaeria arxii CBS | KAF2015995.1 | 2253 | 3362 | | | | | | | | | | | | | | | |
| 175.79 | | | | | | | | | | | | | | | | | | |
| Aaosphaeria arxii CBS | KAF2015995.1 | 2254 | 3363 | | | | | | | | | | | | | | | |
| 175.79 | | | | | | | | | | | | | | | | | | |
| Aaosphaeria arxii CBS | KAF2015995.1 | 2255 | 3364 | 4693 | | | | | | | | | | | | | | |
| 175.79 | | | | | | | | | | | | | | | | | | |
| Aaosphaeria arxii CBS | KAF2015995.1 | 2256 | 3365 | 4694 | | | | | | | | | | | | | | |
| 175.79 | | | | | | | | | | | | | | | | | | |
| Aaosphaeria arxii CBS | KAF2015995.1 | 2257 | 3366 | 4695 | | | | | | | | | | | | | | |
| 175.79 | | | | | | | | | | | | | | | | | | |
| Aaosphaeria arxii CBS | KAF2015995.1 | 2258 | 3367 | | | | | | | | | | | | | | | |
| 175.79 | | | | | | | | | | | | | | | | | | |
| Acremonium chrysogenum | KFH48810.1 | 2259 | 3368 | | | | | | | | | | | | | | | |
| ATCC 11550 | | | | | | | | | | | | | | | | | | |
| Acremonium chrysogenum | KFH48810.1 | 2260 | 3369 | | | | | | | | | | | | | | | |
| ATCC 11550 | | | | | | | | | | | | | | | | | | |
| Akanthomyces lecanii | OAA76807.1 | 2261 | 3370 | | | | | | | | | | | | | | | |
| RCEF 1005 | | | | | | | | | | | | | | | | | | |
| Akanthomyces lecanii | OAA76807.1 | 2262 | 3371 | | | | | | | | | | | | | | | |
| RCEF 1005 | | | | | | | | | | | | | | | | | | |
| Amniculicola lignicola CBS | KAF1998093.1 | 2263 | 3372 | | | | | | | | | | | | | | | |
| 123094 | | | | | | | | | | | | | | | | | | |
| Amniculicola lignicola CBS | KAF1998093.1 | 2264 | 3373 | | | | | | | | | | | | | | | |
| 123094 | | | | | | | | | | | | | | | | | | |
| Amniculicola lignicola CBS | KAF1998093.1 | 2265 | 3374 | 4651 | | | | | | | | | | | | | | |
| 123094 | | | | | | | | | | | | | | | | | | |
| Amorphotheca resinae | PSS27704.1 | 2266 | 3375 | 4707 | 5040 | 5328 | | | | | | | | | | | | |
| ATCC 22711 | | | | | | | | | | | | | | | | | | |
| Amorphotheca resinae | PSS27704.1 | 2267 | 3376 | | | | | | | | | | | | | | | |
| ATCC 22711 | | | | | | | | | | | | | | | | | | |
| Amorphotheca resinae | PSS27704.1 | 2268 | 3377 | | | | | | | | | | | | | | | |
| ATCC 22711 | | | | | | | | | | | | | | | | | | |
| Amorphotheca resinae | PSS27704.1 | 2269 | 3378 | | | | | | | | | | | | | | | |
| ATCC 22711 | | | | | | | | | | | | | | | | | | |
| Aplosporella prunicola CBS | KAF2141764.1 | 2270 | 3379 | 4728 | | | | | | | | | | | | | | |
| 121167 | | | | | | | | | | | | | | | | | | |
| Aplosporella prunicola CBS | KAF2141764.1 | 2271 | 3380 | | | | | | | | | | | | | | | |
| 121167 | | | | | | | | | | | | | | | | | | |
| Aplosporella prunicola CBS | KAF2141764.1 | 2272 | 3381 | 4730 | | | | | | | | | | | | | | |
| 121167 | | | | | | | | | | | | | | | | | | |
| Aspergillus aculeatinus | RAH72722.1 | 2273 | 3382 | | | | | | | | | | | | | | | |
| CBS 121060 | | | | | | | | | | | | | | | | | | |
| Aspergillus aculeatinus | RAH72722.1 | 2274 | 3383 | | | | | | | | | | | | | | | |
| CBS 121060 | | | | | | | | | | | | | | | | | | |
| Aspergillus aculeatus | OJK00586.1 | 2275 | 3384 | | | | | | | | | | | | | | | |
| ATCC 16872 | | | | | | | | | | | | | | | | | | |
| Aspergillus aculeatus | OJK00586.1 | 2276 | 3385 | | | | | | | | | | | | | | | |
| ATCC 16872 | | | | | | | | | | | | | | | | | | |
| Aspergillus alliaceus | KAB8230652.1 | 2277 | 3386 | | | | | | | | | | | | | | | |
| Aspergillus alliaceus | KAB8230652.1 | 2278 | 3387 | | | | | | | | | | | | | | | |
| Aspergillus alliaceus | KAE8389964.1 | 2279 | 3388 | | | | | | | | | | | | | | | |
| Aspergillus alliaceus | KAE8389964.1 | 2280 | 3389 | | | | | | | | | | | | | | | |
| Aspergillus arachidicola | PIG89612.1 | 2281 | 3390 | | | | | | | | | | | | | | | |
| Aspergillus arachidicola | PIG89612.1 | 2282 | 3391 | | | | | | | | | | | | | | | |
| Aspergillus avenaceus | KAE8144608.1 | 2283 | 3392 | | | | | | | | | | | | | | | |
| Aspergillus avenaceus | KAE8144608.1 | 2284 | 3393 | | | | | | | | | | | | | | | |
| Aspergillus awamori | GCB22304.1 | 2285 | 3394 | | | | | | | | | | | | | | | |
| Aspergillus awamori | GCB22304.1 | 2286 | 3395 | | | | | | | | | | | | | | | |
| Aspergillus bertholletiae | KAE8376855.1 | 2287 | 3396 | | | | | | | | | | | | | | | |
| Aspergillus bertholletiae | KAE8376855.1 | 2288 | 3397 | | | | | | | | | | | | | | | |
| Aspergillus bombycis | OGM40854.1 | 2289 | 3398 | | | | | | | | | | | | | | | |
| Aspergillus bombycis | OGM40854.1 | 2290 | 3399 | | | | | | | | | | | | | | | |
| Aspergillus brasiliensis | OJJ70798.1 | 2291 | 3400 | | | | | | | | | | | | | | | |
| CBS 101740 | | | | | | | | | | | | | | | | | | |
| Aspergillus brasiliensis | OJJ70798.1 | 2292 | 3401 | | | | | | | | | | | | | | | |
| CBS 101740 | | | | | | | | | | | | | | | | | | |
| Aspergillus brunneoviolaceus CBS | RAH46433.1 | 2293 | 3402 | | | | | | | | | | | | | | | |
| 621.78 | | | | | | | | | | | | | | | | | | |
| Aspergillus brunneoviolaceus CBS | RAH46433.1 | 2294 | 3403 | | | | | | | | | | | | | | | |
| 621.78 | | | | | | | | | | | | | | | | | | |
| Aspergillus campestris IBT | PKY03999.1 | 2295 | 3404 | | | | | | | | | | | | | | | |
| 28561 | | | | | | | | | | | | | | | | | | |
| Aspergillus campestris IBT | PKY03999.1 | 2296 | 3405 | | | | | | | | | | | | | | | |
| 28561 | | | | | | | | | | | | | | | | | | |
| Aspergillus candidus | PLB36309.1 | 2297 | 3406 | | | | | | | | | | | | | | | |
| Aspergillus candidus | PLB36309.1 | 2298 | 3407 | | | | | | | | | | | | | | | |
| Aspergillus carbonarius | OOF96912.1 | 2299 | 3408 | | | | | | | | | | | | | | | |
| ITEM 5010 | | | | | | | | | | | | | | | | | | |
| Aspergillus carbonarius | OOF96912.1 | 2300 | 3409 | | | | | | | | | | | | | | | |
| ITEM 5010 | | | | | | | | | | | | | | | | | | |
| Aspergillus carbonarius | OOF96947.1 | 2301 | 3410 | | | | | | | | | | | | | | | |
| ITEM 5010 | | | | | | | | | | | | | | | | | | |
| Aspergillus carbonarius | OOF96947.1 | 2302 | 3411 | | | | | | | | | | | | | | | |
| ITEM 5010 | | | | | | | | | | | | | | | | | | |
| Aspergillus clavatus NRRL 1 | EAW11125.1 | 2303 | 3412 | | | | | | | | | | | | | | | |
| Aspergillus clavatus NRRL 1 | EAW11125.1 | 2304 | 3413 | | | | | | | | | | | | | | | |
| Aspergillus coremiiformis | KAE8348912.1 | 2305 | 3414 | | | | | | | | | | | | | | | |
| Aspergillus coremiiformis | KAE8348912.1 | 2306 | 3415 | | | | | | | | | | | | | | | |
| Aspergillus costaricaensis | RAK83224.1 | 2307 | 3416 | | | | | | | | | | | | | | | |
| CBS 115574 | | | | | | | | | | | | | | | | | | |
| Aspergillus costaricaensis | RAK83224.1 | 2308 | 3417 | | | | | | | | | | | | | | | |
| CBS 115574 | | | | | | | | | | | | | | | | | | |
| Aspergillus ellipticus CBS | PYH94413.1 | 2309 | 3418 | | | | | | | | | | | | | | | |
| 707.79 | | | | | | | | | | | | | | | | | | |
| Aspergillus ellipticus CBS | PYH94413.1 | 2310 | 3419 | | | | | | | | | | | | | | | |
| 707.79 | | | | | | | | | | | | | | | | | | |
| Aspergillus eucalypticola | PWY62495.1 | 2311 | 3420 | | | | | | | | | | | | | | | |
| CBS 122712 | | | | | | | | | | | | | | | | | | |
| Aspergillus eucalypticola | PWY62495.1 | 2312 | 3421 | | | | | | | | | | | | | | | |
| CBS 122712 | | | | | | | | | | | | | | | | | | |
| Aspergillus fijiensis CBS | RAK82478.1 | 2313 | 3422 | | | | | | | | | | | | | | | |
| 313.89 | | | | | | | | | | | | | | | | | | |
| Aspergillus fijiensis CBS | RAK82478.1 | 2314 | 3423 | | | | | | | | | | | | | | | |
| 313.89 | | | | | | | | | | | | | | | | | | |
| Aspergillus fischeri NRRL | EAW15854.1 | 2315 | 3424 | | | | | | | | | | | | | | | |
| 181 | | | | | | | | | | | | | | | | | | |
| Aspergillus fischeri NRRL | EAW15854.1 | 2316 | 3425 | | | | | | | | | | | | | | | |
| 181 | | | | | | | | | | | | | | | | | | |
| Aspergillus flavus | RAQ43823.1 | 2317 | 3426 | | | | | | | | | | | | | | | |
| Aspergillus flavus | RAQ43823.1 | 2318 | 3427 | | | | | | | | | | | | | | | |
| Aspergillus flavus | RAQ67862.1 | 2319 | 3428 | | | | | | | | | | | | | | | |
| Aspergillus flavus | RAQ67862.1 | 2320 | 3429 | | | | | | | | | | | | | | | |
| Aspergillus flavus | RAQ79703.1 | 2321 | 3430 | | | | | | | | | | | | | | | |
| Aspergillus flavus | RAQ79703.1 | 2322 | 3431 | | | | | | | | | | | | | | | |
| Aspergillus flavus | RMZ41536.1 | 2323 | 3432 | | | | | | | | | | | | | | | |
| Aspergillus flavus | RMZ41536.1 | 2324 | 3433 | | | | | | | | | | | | | | | |
| Aspergillus flavus AF70 | KOC09807.1 | 2325 | 3434 | | | | | | | | | | | | | | | |
| Aspergillus flavus AF70 | KOC09807.1 | 2326 | 3435 | | | | | | | | | | | | | | | |
| Aspergillus flavus | EED56518.1 | 2327 | 3436 | | | | | | | | | | | | | | | |
| NRRL3357 | | | | | | | | | | | | | | | | | | |
| Aspergillus flavus | EED56518.1 | 2328 | 3437 | | | | | | | | | | | | | | | |
| NRRL3357 | | | | | | | | | | | | | | | | | | |
| Aspergillus fumigatiaffinis | KAF4221143.1 | 2329 | 3438 | 4602 | 5023 | 5260 | 5401 | 5505 | | | | | | | | | | |
| Aspergillus fumigatiaffinis | KAF4221143.1 | 2330 | 3439 | 4603 | 5024 | 5261 | 5434 | | | | | | | | | | | |
| Aspergillus fumigatiaffinis | KAF4231642.1 | 2331 | 3440 | | | | | | | | | | | | | | | |
| Aspergillus fumigatiaffinis | KAF4231642.1 | 2332 | 3441 | | | | | | | | | | | | | | | |
| Aspergillus fumigatiaffinis | KAF4243273.1 | 2333 | 3442 | | | | | | | | | | | | | | | |
| Aspergillus fumigatiaffinis | KAF4243273.1 | 2334 | 3443 | | | | | | | | | | | | | | | |
| Aspergillus fumigatiaffinis | KAF4251015.1 | 2335 | 3444 | 4777 | 5084 | | | | | | | | | | | | | |
| Aspergillus fumigatiaffinis | KAF4251015.1 | 2336 | 3445 | 4778 | 5085 | | | | | | | | | | | | | |
| Aspergillus fumigatus | KAF4253266.1 | 2337 | 3446 | | | | | | | | | | | | | | | |
| Aspergillus fumigatus | KAF4253266.1 | 2338 | 3447 | | | | | | | | | | | | | | | |
| Aspergillus fumigatus | KAF4258265.1 | 2339 | 3448 | | | | | | | | | | | | | | | |
| Aspergillus fumigatus | KAF4258265.1 | 2340 | 3449 | | | | | | | | | | | | | | | |
| Aspergillus fumigatus | KAF4260528.1 | 2341 | 3450 | | | | | | | | | | | | | | | |
| Aspergillus fumigatus | KAF4260528.1 | 2342 | 3451 | | | | | | | | | | | | | | | |
| Aspergillus fumigatus | KAF4280373.1 | 2343 | 3452 | | | | | | | | | | | | | | | |
| Aspergillus fumigatus | KAF4280373.1 | 2344 | 3453 | | | | | | | | | | | | | | | |
| Aspergillus fumigatus | KAF4289752.1 | 2345 | 3454 | | | | | | | | | | | | | | | |
| Aspergillus fumigatus | KAF4289752.1 | 2346 | 3455 | | | | | | | | | | | | | | | |
| Aspergillus fumigatus | OXN06038.1 | 2347 | 3456 | | | | | | | | | | | | | | | |
| Aspergillus fumigatus | OXN06038.1 | 2348 | 3457 | | | | | | | | | | | | | | | |
| Aspergillus fumigatus | OXN25660.1 | 2349 | 3458 | | | | | | | | | | | | | | | |
| Aspergillus fumigatus | OXN25660.1 | 2350 | 3459 | | | | | | | | | | | | | | | |
| Aspergillus fumigatus | EDP49202.1 | 2351 | 3460 | | | | | | | | | | | | | | | |
| A1163 | | | | | | | | | | | | | | | | | | |
| Aspergillus fumigatus | EDP49202.1 | 2352 | 3461 | | | | | | | | | | | | | | | |
| A1163 | | | | | | | | | | | | | | | | | | |
| Aspergillus fumigatus | EAL88490.1 | 2353 | 3462 | | | | | | | | | | | | | | | |
| Af293 | | | | | | | | | | | | | | | | | | |
| Aspergillus fumigatus | EAL88490.1 | 2354 | 3463 | | | | | | | | | | | | | | | |
| Af293 | | | | | | | | | | | | | | | | | | |
| Aspergillus fumigatus Z5 | KMK62965.1 | 2355 | 3464 | | | | | | | | | | | | | | | |
| Aspergillus fumigatus Z5 | KMK62965.1 | 2356 | 3465 | | | | | | | | | | | | | | | |
| Aspergillus fumigatus var. | KEY83811.1 | 2357 | 3466 | | | | | | | | | | | | | | | |
| RP-2014 | | | | | | | | | | | | | | | | | | |
| Aspergillus fumigatus var. | KEY83811.1 | 2358 | 3467 | | | | | | | | | | | | | | | |
| RP-2014 | | | | | | | | | | | | | | | | | | |
| Aspergillus heteromorphus | PWY76160.1 | 2359 | 3468 | | | | | | | | | | | | | | | |
| CBS 117.55 | | | | | | | | | | | | | | | | | | |
| Aspergillus heteromorphus | PWY76160.1 | 2360 | 3469 | | | | | | | | | | | | | | | |
| CBS 117.55 | | | | | | | | | | | | | | | | | | |
| Aspergillus homomorphus | RAL08699.1 | 2361 | 3470 | | | | | | | | | | | | | | | |
| CBS 101889 | | | | | | | | | | | | | | | | | | |
| Aspergillus homomorphus | RAL08699.1 | 2362 | 3471 | | | | | | | | | | | | | | | |
| CBS 101889 | | | | | | | | | | | | | | | | | | |
| Aspergillus ibericus CBS | RAK98322.1 | 2363 | 3472 | | | | | | | | | | | | | | | |
| 121593 | | | | | | | | | | | | | | | | | | |
| Aspergillus ibericus CBS | RAK98322.1 | 2364 | 3473 | | | | | | | | | | | | | | | |
| 121593 | | | | | | | | | | | | | | | | | | |
| Aspergillus indologenus | PYI25318.1 | 2365 | 3474 | | | | | | | | | | | | | | | |
| CBS 114.80 | | | | | | | | | | | | | | | | | | |
| Aspergillus indologenus | PYI25318.1 | 2366 | 3475 | | | | | | | | | | | | | | | |
| CBS 114.80 | | | | | | | | | | | | | | | | | | |
| Aspergillus japonicus CBS | RAH83413.1 | 2367 | 3476 | | | | | | | | | | | | | | | |
| 114.51 | | | | | | | | | | | | | | | | | | |
| Aspergillus japonicus CBS | RAH83413.1 | 2368 | 3477 | | | | | | | | | | | | | | | |
| 114.51 | | | | | | | | | | | | | | | | | | |
| Aspergillus lentulus | GAQ03497.1 | 2369 | 3478 | | | | | | | | | | | | | | | |
| Aspergillus lentulus | GAQ03497.1 | 2370 | 3479 | | | | | | | | | | | | | | | |
| Aspergillus lentulus | GFF27988.1 | 2371 | 3480 | | | | | | | | | | | | | | | |
| Aspergillus lentulus | GFF27988.1 | 2372 | 3481 | | | | | | | | | | | | | | | |
| Aspergillus lentulus | GFF47840.1 | 2373 | 3482 | | | | | | | | | | | | | | | |
| Aspergillus lentulus | GFF47840.1 | 2374 | 3483 | | | | | | | | | | | | | | | |
| Aspergillus lentulus | GFF76341.1 | 2375 | 3484 | | | | | | | | | | | | | | | |
| Aspergillus lentulus | GFF76341.1 | 2376 | 3485 | | | | | | | | | | | | | | | |
| Aspergillus lentulus | GFF92029.1 | 2377 | 3486 | | | | | | | | | | | | | | | |
| Aspergillus lentulus | GFF92029.1 | 2378 | 3487 | | | | | | | | | | | | | | | |
| Aspergillus lentulus | GFG02708.1 | 2379 | 3488 | | | | | | | | | | | | | | | |
| Aspergillus lentulus | GFG02708.1 | 2380 | 3489 | | | | | | | | | | | | | | | |
| Aspergillus lentulus | KAF4156140.1 | 2381 | 3490 | | | | | | | | | | | | | | | |
| Aspergillus lentulus | KAF4156140.1 | 2382 | 3491 | | | | | | | | | | | | | | | |
| Aspergillus lentulus | KAF4163322.1 | 2383 | 3492 | | | | | | | | | | | | | | | |
| Aspergillus lentulus | KAF4163322.1 | 2384 | 3493 | | | | | | | | | | | | | | | |
| Aspergillus lentulus | KAF4181253.1 | 2385 | 3494 | 4672 | 5052 | 5262 | | | | | | | | | | | | |
| Aspergillus lentulus | KAF4181253.1 | 2386 | 3495 | 4673 | 5054 | | | | | | | | | | | | | |
| Aspergillus lentulus | KAF4186434.1 | 2387 | 3496 | | | | | | | | | | | | | | | |
| Aspergillus lentulus | KAF4186434.1 | 2388 | 3497 | | | | | | | | | | | | | | | |
| Aspergillus lentulus | KAF4198353.1 | 2389 | 3498 | 4674 | 5053 | 5263 | | | | | | | | | | | | |
| Aspergillus lentulus | KAF4198353.1 | 2390 | 3499 | 4675 | 5055 | | | | | | | | | | | | | |
| Aspergillus lentulus | KAF4205243.1 | 2391 | 3500 | | | | | | | | | | | | | | | |
| Aspergillus lentulus | KAF4205243.1 | 2392 | 3501 | | | | | | | | | | | | | | | |
| Aspergillus luchuensis | GAT21750.1 | 2393 | 3502 | | | | | | | | | | | | | | | |
| Aspergillus luchuensis | GAT21750.1 | 2394 | 3503 | | | | | | | | | | | | | | | |
| Aspergillus luchuensis CBS | OJZ84143.1 | 2395 | 3504 | | | | | | | | | | | | | | | |
| 106.47 | | | | | | | | | | | | | | | | | | |
| Aspergillus luchuensis CBS | OJZ84143.1 | 2396 | 3505 | | | | | | | | | | | | | | | |
| 106.47 | | | | | | | | | | | | | | | | | | |
| Aspergillus luchuensis IFO | GAA90114.1 | 2397 | 3506 | | | | | | | | | | | | | | | |
| 4308 | | | | | | | | | | | | | | | | | | |
| Aspergillus luchuensis IFO | GAA90114.1 | 2398 | 3507 | | | | | | | | | | | | | | | |
| 4308 | | | | | | | | | | | | | | | | | | |
| Aspergillus mulundensis | RDW57407.1 | 2399 | 3508 | | | | | | | | | | | | | | | |
| Aspergillus mulundensis | RDW57407.1 | 2400 | 3509 | 4492 | 4910 | | | | | | | | | | | | | |
| Aspergillus neoniger CBS | PYH29563.1 | 2401 | 3510 | | | | | | | | | | | | | | | |
| 115656 | | | | | | | | | | | | | | | | | | |
| Aspergillus neoniger CBS | PYH29563.1 | 2402 | 3511 | | | | | | | | | | | | | | | |
| 115656 | | | | | | | | | | | | | | | | | | |
| Aspergillus niger | CAK43384.1 | 2403 | 3512 | | | | | | | | | | | | | | | |
| Aspergillus niger | CAK43384.1 | 2404 | 3513 | | | | | | | | | | | | | | | |
| Aspergillus niger | GAQ44527.1 | 2405 | 3514 | | | | | | | | | | | | | | | |
| Aspergillus niger | GAQ44527.1 | 2406 | 3515 | | | | | | | | | | | | | | | |
| Aspergillus niger | SPB53044.1 | 2407 | 3516 | | | | | | | | | | | | | | | |
| Aspergillus niger | SPB53044.1 | 2408 | 3517 | | | | | | | | | | | | | | | |
| Aspergillus niger | TPR01726.1 | 2409 | 3518 | | | | | | | | | | | | | | | |
| Aspergillus niger | TPR01726.1 | 2410 | 3519 | | | | | | | | | | | | | | | |
| Aspergillus niger ATCC | EHA19251.1 | 2411 | 3520 | | | | | | | | | | | | | | | |
| 1015 | | | | | | | | | | | | | | | | | | |
| Aspergillus niger ATCC | EHA19251.1 | 2412 | 3521 | | | | | | | | | | | | | | | |
| 1015 | | | | | | | | | | | | | | | | | | |
| Aspergillus niger ATCC | RDH23413.1 | 2413 | 3522 | | | | | | | | | | | | | | | |
| 13496 | | | | | | | | | | | | | | | | | | |
| Aspergillus niger ATCC | RDH23413.1 | 2414 | 3523 | | | | | | | | | | | | | | | |
| 13496 | | | | | | | | | | | | | | | | | | |
| Aspergillus niger CBS | PYH56423.1 | 2415 | 3524 | | | | | | | | | | | | | | | |
| 101883 | | | | | | | | | | | | | | | | | | |
| Aspergillus niger CBS | PYH56423.1 | 2416 | 3525 | | | | | | | | | | | | | | | |
| 101883 | | | | | | | | | | | | | | | | | | |
| Aspergillus nomiae NRRL | KNG86060.1 | 2417 | 3526 | | | | | | | | | | | | | | | |
| 13137 | | | | | | | | | | | | | | | | | | |
| Aspergillus nomiae NRRL | KNG86060.1 | 2418 | 3527 | | | | | | | | | | | | | | | |
| 13137 | | | | | | | | | | | | | | | | | | |
| Aspergillus novofumigatus | PKX95749.1 | 2419 | 3528 | | | | | | | | | | | | | | | |
| IBT 16806 | | | | | | | | | | | | | | | | | | |
| Aspergillus novofumigatus | PKX95749.1 | 2420 | 3529 | | | | | | | | | | | | | | | |
| IBT 16806 | | | | | | | | | | | | | | | | | | |
| Aspergillus phoenicis | RDK36520.1 | 2421 | 3530 | | | | | | | | | | | | | | | |
| ATCC 13157 | | | | | | | | | | | | | | | | | | |
| Aspergillus phoenicis | RDK36520.1 | 2422 | 3531 | | | | | | | | | | | | | | | |
| ATCC 13157 | | | | | | | | | | | | | | | | | | |
| Aspergillus piperis CBS | RAH51938.1 | 2423 | 3532 | | | | | | | | | | | | | | | |
| 112811 | | | | | | | | | | | | | | | | | | |
| Aspergillus piperis CBS | RAH51938.1 | 2424 | 3533 | | | | | | | | | | | | | | | |
| 112811 | | | | | | | | | | | | | | | | | | |
| Aspergillus saccharolyticus | PYH40521.1 | 2425 | 3534 | | | | | | | | | | | | | | | |
| JOP 1030-1 | | | | | | | | | | | | | | | | | | |
| Aspergillus saccharolyticus | PYH40521.1 | 2426 | 3535 | | | | | | | | | | | | | | | |
| JOP 1030-1 | | | | | | | | | | | | | | | | | | |
| Aspergillus sclerotialis | RJE26598.1 | 2427 | 3536 | | | | | | | | | | | | | | | |
| Aspergillus sclerotialis | RJE26598.1 | 2428 | 3537 | | | | | | | | | | | | | | | |
| Aspergillus sclerotiicarbonarius CBS | PYI09055.1 | 2429 | 3538 | | | | | | | | | | | | | | | |
| 121057 | | | | | | | | | | | | | | | | | | |
| Aspergillus sclerotiicarbonarius CBS | PYI09055.1 | 2430 | 3539 | | | | | | | | | | | | | | | |
| 121057 | | | | | | | | | | | | | | | | | | |
| Aspergillus taichungensis | PLN84247.1 | 2431 | 3540 | | | | | | | | | | | | | | | |
| Aspergillus taichungensis | PLN84247.1 | 2432 | 3541 | | | | | | | | | | | | | | | |
| Aspergillus terreus | GFF18647.1 | 2433 | 3542 | | | | | | | | | | | | | | | |
| Aspergillus terreus | GFF18647.1 | 2434 | 3543 | | | | | | | | | | | | | | | |
| Aspergillus terreus | EAU31669.1 | 2435 | 3544 | | | | | | | | | | | | | | | |
| NIH2624 | | | | | | | | | | | | | | | | | | |
| Aspergillus terreus | EAU31669.1 | 2436 | 3545 | | | | | | | | | | | | | | | |
| NIH2624 | | | | | | | | | | | | | | | | | | |
| Aspergillus thermomutatus | RHZ62685.1 | 2437 | 3546 | | | | | | | | | | | | | | | |
| Aspergillus thermomutatus | RHZ62685.1 | 2438 | 3547 | | | | | | | | | | | | | | | |
| Aspergillus tubingensis | GFN10216.1 | 2439 | 3548 | | | | | | | | | | | | | | | |
| Aspergillus tubingensis | GFN10216.1 | 2440 | 3549 | | | | | | | | | | | | | | | |
| Aspergillus tubingensis | OJI90517.1 | 2441 | 3550 | | | | | | | | | | | | | | | |
| CBS 134.48 | | | | | | | | | | | | | | | | | | |
| Aspergillus tubingensis | OJI90517.1 | 2442 | 3551 | | | | | | | | | | | | | | | |
| CBS 134.48 | | | | | | | | | | | | | | | | | | |
| Aspergillus turcosus | RHZ68865.1 | 2443 | 3552 | | | | | | | | | | | | | | | |
| Aspergillus turcosus | RHZ68865.1 | 2444 | 3553 | | | | | | | | | | | | | | | |
| Aspergillus turcosus | RLL97228.1 | 2445 | 3554 | | | | | | | | | | | | | | | |
| Aspergillus turcosus | RLL97228.1 | 2446 | 3555 | | | | | | | | | | | | | | | |
| Aspergillus udagawae | GAO87704.1 | 2447 | 3556 | | | | | | | | | | | | | | | |
| Aspergillus udagawae | GAO87704.1 | 2448 | 3557 | | | | | | | | | | | | | | | |
| Aspergillus udagawae | GFF35348.1 | 2449 | 3558 | | | | | | | | | | | | | | | |
| Aspergillus udagawae | GFF35348.1 | 2450 | 3559 | | | | | | | | | | | | | | | |
| Aspergillus udagawae | GFF49395.1 | 2451 | 3560 | | | | | | | | | | | | | | | |
| Aspergillus udagawae | GFF49395.1 | 2452 | 3561 | | | | | | | | | | | | | | | |
| Aspergillus udagawae | GFF89968.1 | 2453 | 3562 | | | | | | | | | | | | | | | |
| Aspergillus udagawae | GFF89968.1 | 2454 | 3563 | | | | | | | | | | | | | | | |
| Aspergillus udagawae | GFG13593.1 | 2455 | 3564 | | | | | | | | | | | | | | | |
| Aspergillus udagawae | GFG13593.1 | 2456 | 3565 | | | | | | | | | | | | | | | |
| Aspergillus uvarum CBS | PYH76147.1 | 2457 | 3566 | | | | | | | | | | | | | | | |
| 121591 | | | | | | | | | | | | | | | | | | |
| Aspergillus uvarum CBS | PYH76147.1 | 2458 | 3567 | | | | | | | | | | | | | | | |
| 121591 | | | | | | | | | | | | | | | | | | |
| Aspergillus vadensis CBS | PYH71369.1 | 2459 | 3568 | | | | | | | | | | | | | | | |
| 113365 | | | | | | | | | | | | | | | | | | |
| Aspergillus vadensis CBS | PYH71369.1 | 2460 | 3569 | | | | | | | | | | | | | | | |
| 113365 | | | | | | | | | | | | | | | | | | |
| Aspergillus violaceofuscus | PYI23329.1 | 2461 | 3570 | | | | | | | | | | | | | | | |
| CBS 115571 | | | | | | | | | | | | | | | | | | |
| Aspergillus violaceofuscus | PYI23329.1 | 2462 | 3571 | | | | | | | | | | | | | | | |
| CBS 115571 | | | | | | | | | | | | | | | | | | |
| Aspergillus welwitschiae | RDH32041.1 | 2463 | 3572 | | | | | | | | | | | | | | | |
| Aspergillus welwitschiae | RDH32041.1 | 2464 | 3573 | | | | | | | | | | | | | | | |
| Aulographum hederae CBS | KAF1987766.1 | 2465 | 3574 | | | | | | | | | | | | | | | |
| 113979 | | | | | | | | | | | | | | | | | | |
| Aulographum hederae CBS | KAF1987766.1 | 2466 | 3575 | | | | | | | | | | | | | | | |
| 113979 | | | | | | | | | | | | | | | | | | |
| Aulographum hederae CBS | KAF1987766.1 | 2467 | 3576 | | | | | | | | | | | | | | | |
| 113979 | | | | | | | | | | | | | | | | | | |
| Aulographum hederae CBS | KAF1987766.1 | 2468 | 3577 | | | | | | | | | | | | | | | |
| 113979 | | | | | | | | | | | | | | | | | | |
| Aulographum hederae CBS | KAF1987766.1 | 2469 | 3578 | | | | | | | | | | | | | | | |
| 113979 | | | | | | | | | | | | | | | | | | |
| Beauveria bassiana | KAF1729757.1 | 2470 | 3579 | 4769 | | | | | | | | | | | | | | |
| Beauveria bassiana | KAF1729757.1 | 2471 | 3580 | 4770 | | | | | | | | | | | | | | |
| Beauveria bassiana | KAF1729757.1 | 2472 | 3581 | 4765 | 5080 | | | | | | | | | | | | | |
| Beauveria bassiana | PMB64760.1 | 2473 | 3582 | 4771 | | | | | | | | | | | | | | |
| Beauveria bassiana | PMB64760.1 | 2474 | 3583 | 4772 | | | | | | | | | | | | | | |
| Beauveria bassiana | PMB64760.1 | 2475 | 3584 | 4766 | 5081 | | | | | | | | | | | | | |
| Beauveria bassiana ARSEF | EJP68112.1 | 2476 | 3585 | 4773 | | | | | | | | | | | | | | |
| 2860 | | | | | | | | | | | | | | | | | | |
| Beauveria bassiana ARSEF | EJP68112.1 | 2477 | 3586 | 4774 | | | | | | | | | | | | | | |
| 2860 | | | | | | | | | | | | | | | | | | |
| Beauveria bassiana ARSEF | EJP68112.1 | 2478 | 3587 | 4767 | 5082 | | | | | | | | | | | | | |
| 2860 | | | | | | | | | | | | | | | | | | |
| Beauveria bassiana D1-5 | KGQ07814.1 | 2479 | 3588 | 4775 | | | | | | | | | | | | | | |
| Beauveria bassiana D1-5 | KGQ07814.1 | 2480 | 3589 | 4776 | | | | | | | | | | | | | | |
| Beauveria bassiana D1-5 | KGQ07814.1 | 2481 | 3590 | 4768 | 5083 | | | | | | | | | | | | | |
| Beauveria brongniartii | OAA52838.1 | 2482 | 3591 | 4857 | | | | | | | | | | | | | | |
| RCEF 3172 | | | | | | | | | | | | | | | | | | |
| Beauveria brongniartii | OAA52838.1 | 2483 | 3592 | 4858 | | | | | | | | | | | | | | |
| RCEF 3172 | | | | | | | | | | | | | | | | | | |
| Beauveria brongniartii | OAA52838.1 | 2484 | 3593 | | | | | | | | | | | | | | | |
| RCEF 3172 | | | | | | | | | | | | | | | | | | |
| Botryosphaeria dothidea | KAF4309375.1 | 2485 | 3594 | | | | | | | | | | | | | | | |
| Botryosphaeria dothidea | KAF4309375.1 | 2486 | 3595 | 4659 | 5018 | | | | | | | | | | | | | |
| Botryosphaeria dothidea | KAF4309375.1 | 2487 | 3596 | 4664 | | | | | | | | | | | | | | |
| Botryosphaeria dothidea | KAF4309375.1 | 2488 | 3597 | | | | | | | | | | | | | | | |
| Botryosphaeria dothidea | KAF4312262.1 | 2489 | 3598 | | | | | | | | | | | | | | | |
| Botryosphaeria dothidea | KAF4312262.1 | 2490 | 3599 | 4660 | 5019 | | | | | | | | | | | | | |
| Botryosphaeria dothidea | KAF4312262.1 | 2491 | 3600 | | | | | | | | | | | | | | | |
| Botryosphaeria dothidea | KAF4312262.1 | 2492 | 3601 | | | | | | | | | | | | | | | |
| Botryotinia calthae | TEY43656.1 | 2493 | 3602 | | | | | | | | | | | | | | | |
| Botryotinia calthae | TEY43656.1 | 2494 | 3603 | | | | | | | | | | | | | | | |
| Botryotinia calthae | TEY43656.1 | 2495 | 3604 | 4833 | 5126 | 5319 | 5431 | 5503 | 5559 | | | | | | | | | |
| Botryotinia calthae | TEY43656.1 | 2496 | 3605 | 4828 | 5127 | 5320 | 5432 | 5504 | 5560 | | | | | | | | | |
| Botryotinia calthae | TEY43656.1 | 2497 | 3606 | 4829 | 5128 | 5321 | | | | | | | | | | | | |
| Botryotinia calthae | TEY43656.1 | 2498 | 3607 | | | | | | | | | | | | | | | |
| Botryotinia calthae | TEY43656.1 | 2499 | 3608 | | | | | | | | | | | | | | | |
| Botryotinia calthae | TEY43656.1 | 2500 | 3609 | | | | | | | | | | | | | | | |
| Botryotinia calthae | TEY43656.1 | 2501 | 3610 | | | | | | | | | | | | | | | |
| Botryotinia convoluta | TGO65046.1 | 2502 | 3611 | | | | | | | | | | | | | | | |
| Botryotinia convoluta | TGO65046.1 | 2503 | 3612 | 4823 | 5115 | 5294 | 5413 | 5483 | 5557 | | | | | | | | | |
| Botryotinia convoluta | TGO65046.1 | 2504 | 3613 | 4821 | 5116 | 5295 | 5414 | 5484 | 5558 | | | | | | | | | |
| Botryotinia convoluta | TGO65046.1 | 2505 | 3614 | 4861 | | | | | | | | | | | | | | |
| Botryotinia convoluta | TGO65046.1 | 2506 | 3615 | | | | | | | | | | | | | | | |
| Botryotinia convoluta | TGO65046.1 | 2507 | 3616 | | | | | | | | | | | | | | | |
| Botryotinia narcissicola | TGO66426.1 | 2508 | 3617 | | | | | | | | | | | | | | | |
| Botryotinia narcissicola | TGO66426.1 | 2509 | 3618 | 4557 | 4952 | 5209 | 5372 | 5465 | 5565 | 5602 | 5632 | | | | | | | |
| Botryotinia narcissicola | TGO66426.1 | 2510 | 3619 | 4517 | 4972 | 5218 | 5378 | 5471 | 5537 | 5585 | 2629 | | | | | | | |
| Botryotinia narcissicola | TGO66426.1 | 2511 | 3620 | | | | | | | | | | | | | | | |
| Botryotinia narcissicola | TGO66426.1 | 2512 | 3621 | | | | | | | | | | | | | | | |
| Botryotinia narcissicola | TGO66426.1 | 2513 | 3622 | | | | | | | | | | | | | | | |
| Botrytis cinerea B05.10 | ATZ46079.1 | 2514 | 3623 | | | | | | | | | | | | | | | |
| Botrytis cinerea B05.10 | ATZ46079.1 | 2515 | 3624 | 4553 | 4946 | 5206 | 5369 | 5461 | 5526 | 5598 | 5626 | 5652 | | | | | | |
| Botrytis cinerea B05.10 | ATZ46079.1 | 2516 | 3625 | 4488 | 4900 | 5169 | 5343 | 5455 | 5532 | 5580 | 5614 | 5639 | 5663 | | | | | |
| Botrytis cinerea B05.10 | ATZ46079.1 | 2517 | 3626 | 4518 | 4917 | 5174 | 5347 | 5445 | 5518 | | | | | | | | | |
| Botrytis cinerea B05.10 | ATZ46079.1 | 2518 | 3627 | 4522 | 4921 | 5177 | 5364 | 5468 | 5540 | | | | | | | | | |
| Botrytis cinerea B05.10 | ATZ46079.1 | 2519 | 3628 | | | | | | | | | | | | | | | |
| Botrytis cinerea B05.10 | ATZ46079.1 | 2520 | 3629 | | | | | | | | | | | | | | | |
| Botrytis cinerea B05.10 | ATZ46079.1 | 2521 | 3630 | | | | | | | | | | | | | | | |
| Botrytis cinerea BcDW1 | EMR84438.1 | 2522 | 3631 | | | | | | | | | | | | | | | |
| Botrytis cinerea BcDW1 | EMR84438.1 | 2523 | 3632 | 4554 | 4949 | 5208 | 5371 | 5463 | 5528 | 5600 | 5628 | 5654 | | | | | | |
| Botrytis cinerea BcDW1 | EMR84438.1 | 2524 | 3633 | 4489 | 4901 | 5170 | 5344 | 5456 | 5533 | 5581 | 5615 | 5640 | | | | | | |
| Botrytis cinerea BcDW1 | EMR84438.1 | 2525 | 3634 | 4519 | 4918 | 5175 | 5348 | 5446 | 5519 | | | | | | | | | |
| Botrytis cinerea BcDW1 | EMR84438.1 | 2526 | 3635 | 4523 | 4923 | 5179 | 5366 | 5470 | 5542 | | | | | | | | | |
| Botrytis cinerea BcDW1 | EMR84438.1 | 2527 | 3636 | | | | | | | | | | | | | | | |
| Botrytis cinerea BcDW1 | EMR84438.1 | 2528 | 3637 | | | | | | | | | | | | | | | |
| Botrytis cinerea BcDW1 | EMR84438.1 | 2529 | 3638 | | | | | | | | | | | | | | | |
| Botrytis cinerea T4 | CCD45798.1 | 2530 | 3639 | | | | | | | | | | | | | | | |
| Botrytis cinerea T4 | CCD45798.1 | 2531 | 3640 | 4555 | 4947 | 5207 | 5370 | 5462 | 5527 | 5599 | 5627 | 2653 | 5664 | | | | | |
| Botrytis cinerea T4 | CCD45798.1 | 2532 | 3641 | 4490 | 4902 | 5171 | 5345 | 5457 | 5534 | 5582 | 5616 | 5641 | | | | | | |
| Botrytis cinerea T4 | CCD45798.1 | 2533 | 3642 | 4520 | 4919 | 5176 | 5349 | 5447 | 5520 | | | | | | | | | |
| Botrytis cinerea T4 | CCD45798.1 | 2534 | 3643 | 4524 | 4922 | 5178 | 5365 | 5469 | 5541 | | | | | | | | | |
| Botrytis cinerea T4 | CCD45798.1 | 2535 | 3644 | | | | | | | | | | | | | | | |
| Botrytis cinerea T4 | CCD45798.1 | 2536 | 3645 | | | | | | | | | | | | | | | |
| Botrytis cinerea T4 | CCD45798.1 | 2537 | 3646 | | | | | | | | | | | | | | | |
| Botrytis elliptica | TGO79273.1 | 2538 | 3647 | | | | | | | | | | | | | | | |
| Botrytis elliptica | TGO79273.1 | 2539 | 3648 | | | | | | | | | | | | | | | |
| Botrytis elliptica | TGO79273.1 | 2540 | 3649 | 4818 | 5114 | 5293 | 5412 | 5481 | 5553 | 5594 | 5622 | | | | | | | |
| Botrytis elliptica | TGO79273.1 | 2541 | 3650 | | | | | | | | | | | | | | | |
| Botrytis elliptica | TGO79273.1 | 2542 | 3651 | | | | | | | | | | | | | | | |
| Botrytis fragariae | KAF5878228.1 | 2543 | 3652 | 4681 | | | | | | | | | | | | | | |
| Botrytis fragariae | KAF5878228.1 | 2544 | 3653 | 4516 | 4945 | 5190 | 5363 | 5458 | 5523 | 5573 | 5607 | 5650 | 5671 | 5680 | 5688 | | | |
| Botrytis fragariae | KAF5878228.1 | 2545 | 3654 | 4471 | 4898 | 5167 | 5340 | 5442 | 5512 | 5568 | 5605 | 5635 | 5658 | 5675 | 5683 | 5691 | 5695 | |
| Botrytis fragariae | KAF5878228.1 | 2546 | 3655 | 4556 | 4948 | 5205 | 5367 | 5459 | 5524 | 5583 | 5617 | 5651 | 5672 | 5681 | 5689 | | | |
| Botrytis fragariae | KAF5878228.1 | 2547 | 3656 | 4472 | 4896 | 5166 | 5341 | 5443 | 5513 | 5572 | 5612 | 5367 | 5660 | 5677 | 5685 | 5692 | 5696 | 5698 |
| Botrytis fragariae | KAF5878228.1 | 2548 | 3657 | 4485 | 4920 | 5180 | 5350 | 5448 | 5514 | 5571 | 5604 | 5634 | 5659 | 5676 | 5684 | 5693 | 5697 | |
| Botrytis galanthina | THV53187.1 | 2549 | 3658 | | | | | | | | | | | | | | | |
| Botrytis galanthina | THV53187.1 | 2550 | 3659 | 4558 | 4950 | 5191 | 5368 | 5460 | 5525 | 5601 | 5631 | 5656 | 5673 | | | | | |
| Botrytis galanthina | THV53187.1 | 2551 | 3660 | 4473 | 4913 | 5172 | 5346 | 5444 | 5521 | 5577 | 5613 | 5638 | 5662 | | | | | |
| Botrytis galanthina | THV53187.1 | 2552 | 3661 | | | | | | | | | | | | | | | |
| Botrytis galanthina | THV53187.1 | 2553 | 3662 | | | | | | | | | | | | | | | |
| Botrytis galanthina | THV53187.1 | 2554 | 3663 | | | | | | | | | | | | | | | |
| Botrytis hyacinthi | TGO34871.1 | 2555 | 3664 | | | | | | | | | | | | | | | |
| Botrytis hyacinthi | TGO34871.1 | 2556 | 3665 | 4824 | 5121 | 5299 | 5415 | 5490 | 5551 | 5591 | 5620 | 5647 | 5669 | | | | | |
| Botrytis hyacinthi | TGO34871.1 | 2557 | 3666 | 4822 | 5122 | 5302 | 5416 | 5491 | 5552 | 5592 | 5621 | 5648 | 5670 | | | | | |
| Botrytis hyacinthi | TGO34871.1 | 2558 | 3667 | | | | | | | | | | | | | | | |
| Botrytis hyacinthi | TGO34871.1 | 2559 | 3668 | | | | | | | | | | | | | | | |
| Botrytis hyacinthi | TGO34871.1 | 2560 | 3669 | 4820 | 5120 | 5297 | 5426 | 5500 | 5554 | 5593 | 5623 | 5649 | | | | | | |
| Botrytis paeoniae | TGO31321.1 | 2561 | 3670 | | | | | | | | | | | | | | | |
| Botrytis paeoniae | TGO31321.1 | 2562 | 3671 | 4830 | 5124 | 5300 | 5420 | 5501 | 5561 | | | | | | | | | |
| Botrytis paeoniae | TGO31321.1 | 2563 | 3672 | 4831 | 5123 | 5303 | 5421 | 5502 | 5562 | | | | | | | | | |
| Botrytis paeoniae | TGO31321.1 | 2564 | 3673 | | | | | | | | | | | | | | | |
| Botrytis paeoniae | TGO31321.1 | 2565 | 3674 | | | | | | | | | | | | | | | |
| Botrytis paeoniae | TGO31321.1 | 2566 | 3675 | | | | | | | | | | | | | | | |
| Botrytis paeoniae | TGO31321.1 | 2567 | 3676 | | | | | | | | | | | | | | | |
| Botrytis porri | TGO85790.1 | 2568 | 3677 | 4832 | 5147 | | | | | | | | | | | | | |
| Botrytis porri | TGO85790.1 | 2569 | 3678 | | | | | | | | | | | | | | | |
| Botrytis porri | TGO85790.1 | 2570 | 3679 | | | | | | | | | | | | | | | |
| Botrytis tulipae | TGO18793.1 | 2571 | 3680 | | | | | | | | | | | | | | | |
| Botrytis tulipae | TGO18793.1 | 2572 | 3681 | 4559 | 4951 | 5192 | 5362 | 5464 | 5529 | 5597 | 5630 | 5655 | | | | | | |
| Botrytis tulipae | TGO18793.1 | 2573 | 3682 | 4474 | 4899 | 5168 | 5342 | | 5522 | 5578 | 5611 | 5645 | | | | | | |
| Botrytis tulipae | TGO18793.1 | 2574 | 3683 | | | | | | | | | | | | | | | |
| Botrytis tulipae | TGO18793.1 | 2575 | 3684 | | | | | | | | | | | | | | | |
| Botrytis tulipae | TGO18793.1 | 2576 | 3685 | | | | | | | | | | | | | | | |
| Cadophora sp. DSE1049 | PVH85678.1 | 2577 | 3686 | 4705 | 5041 | 5324 | 5435 | 5508 | 5564 | 5596 | | | | | | | | |
| Cadophora sp. DSE1049 | PVH85678.1 | 2578 | 3687 | 4706 | 5042 | 5325 | 5436 | 5507 | 5563 | 5595 | 5625 | | | | | | | |
| Cenococcum geophilum | OCK98678.1 | 2579 | 3688 | | | | | | | | | | | | | | | |
| 1.58 | | | | | | | | | | | | | | | | | | |
| Cenococcum geophilum | OCK98678.1 | 2580 | 3689 | | | | | | | | | | | | | | | |
| 1.58 | | | | | | | | | | | | | | | | | | |
| Cenococcum geophilum | OCK98678.1 | 2581 | 3690 | 4654 | 5015 | | | | | | | | | | | | | |
| 1.58 | | | | | | | | | | | | | | | | | | |
| Cenococcum geophilum | OCK98678.1 | 2581 | 3691 | | | | | | | | | | | | | | | |
| 1.58 | | | | | | | | | | | | | | | | | | |
| Chaetomium thermophilum | EGS16968.1 | 2583 | 3692 | | | | | | | | | | | | | | | |
| var. thermophilum DSM | | | | | | | | | | | | | | | | | | |
| 1495 | | | | | | | | | | | | | | | | | | |
| Chaetomium thermophilum | EGS16968.1 | 2584 | 3693 | | | | | | | | | | | | | | | |
| var. thermophilum DSM | | | | | | | | | | | | | | | | | | |
| 1495 | | | | | | | | | | | | | | | | | | |
| Chaetomium thermophilum | EGS16968.1 | 2585 | 3694 | | | | | | | | | | | | | | | |
| var. thermophilum DSM | | | | | | | | | | | | | | | | | | |
| 1495 | | | | | | | | | | | | | | | | | | |
| Chaetomium thermophilum | EGS16968.1 | 2586 | 3695 | | | | | | | | | | | | | | | |
| var. thermophilum DSM | | | | | | | | | | | | | | | | | | |
| 1495 | | | | | | | | | | | | | | | | | | |
| Chaetomium thermophilum | EGS16968.1 | 2587 | 3696 | | | | | | | | | | | | | | | |
| var. thermophilum DSM | | | | | | | | | | | | | | | | | | |
| 1495 | | | | | | | | | | | | | | | | | | |
| Chaetomium thermophilum | EGS16968.1 | 2588 | 3697 | 4743 | 5139 | 5313 | | | | | | | | | | | | |
| var. thermophilum DSM | | | | | | | | | | | | | | | | | | |
| 1495 | | | | | | | | | | | | | | | | | | |
| Chalara longipes BDJ | KAE9381296.1 | 2589 | 3698 | 4867 | 5154 | 5329 | | | | | | | | | | | | |
| Chalara longipes BDJ | KAE9381296.1 | 2590 | 3699 | | | | | | | | | | | | | | | |
| Chlorociboria aeruginascens | TAQ88760.1 | 2591 | 3700 | 4870 | | | | | | | | | | | | | | |
| Chlorociboria aeruginascens | TAQ88760.1 | 2592 | 3701 | 4868 | | | | | | | | | | | | | | |
| Chlorociboria aeruginascens | TAQ88760.1 | 2593 | 3702 | 4869 | 5153 | | | | | | | | | | | | | |
| Chlorociboria aeruginascens | TAQ88760.1 | 2594 | 3703 | | | | | | | | | | | | | | | |
| Chlorociboria aeruginascens | TAQ88760.1 | 2595 | 3704 | | | | | | | | | | | | | | | |
| Chlorociboria aeruginascens | TAQ88760.1 | 2596 | 3705 | | | | | | | | | | | | | | | |
| Claviceps purpurea 20.1 | CCE34786.1 | 2597 | 3706 | | | | | | | | | | | | | | | |
| Claviceps purpurea 20.1 | CCE34786.1 | 2598 | 3707 | | | | | | | | | | | | | | | |
| Coleophoma cylindrospora | RDW77053.1 | 2599 | 3708 | | | | | | | | | | | | | | | |
| Coleophoma cylindrospora | RDW77053.1 | 2600 | 3709 | 4680 | 5028 | | | | | | | | | | | | | |
| Colletotrichum aenigma | KAF5528507.1 | 2601 | 3710 | 4741 | 5063 | 5268 | 5403 | 5496 | | | | | | | | | | |
| Colletotrichum asianum | KAF0331997.1 | 2602 | 3711 | | | | | | | | | | | | | | | |
| Colletotrichum asianum | KAF0331997.1 | 2603 | 3712 | | | | | | | | | | | | | | | |
| Colletotrichum asianum | KAF0331997.1 | 2604 | 3713 | 4749 | 5067 | | | | | | | | | | | | | |
| Colletotrichum asianum | KAF0331997.1 | 2605 | 3714 | | | | | | | | | | | | | | | |
| Colletotrichum fructicola | KAE9574638.1 | 2606 | 3715 | | | | | | | | | | | | | | | |
| Colletotrichum fructicola | KAE9574638.1 | 2607 | 3716 | 4750 | 5068 | 5269 | | | | | | | | | | | | |
| Colletotrichum fructicola | KAF4433056.1 | 2608 | 3717 | | | | | | | | | | | | | | | |
| Colletotrichum fructicola | KAF4433056.1 | 2609 | 3718 | 4543 | 4980 | 5227 | | | | | | | | | | | | |
| Colletotrichum fructicola | KAF4899184.1 | 2610 | 3719 | | | | | | | | | | | | | | | |
| Colletotrichum fructicola | KAF4899184.1 | 2611 | 3720 | 4544 | 4981 | 5228 | | | | | | | | | | | | |
| Colletotrichum fructicola | KAF4906926.1 | 2612 | 3721 | | | | | | | | | | | | | | | |
| Colletotrichum fructicola | KAF4906926.1 | 2613 | 3722 | 4751 | 5069 | 5270 | | | | | | | | | | | | |
| Colletotrichum fructicola | KAF4936062.1 | 2614 | 3723 | | | | | | | | | | | | | | | |
| Colletotrichum fructicola | KAF4936062.1 | 2615 | 3724 | 4545 | 4982 | 5229 | | | | | | | | | | | | |
| Colletotrichum fructicola | KAF5513975.1 | 2616 | 3725 | | | | | | | | | | | | | | | |
| Colletotrichum fructicola | KAF5513975.1 | 2617 | 3726 | 4752 | 5070 | 5271 | | | | | | | | | | | | |
| Colletotrichum fructicola | KAF4491684.1 | 2618 | 3727 | | | | | | | | | | | | | | | |
| Nara gc5 | | | | | | | | | | | | | | | | | | |
| Colletotrichum fructicola | KAF4491684.1 | 2619 | 3728 | 4753 | 5071 | 5272 | | | | | | | | | | | | |
| Nara gc5 | | | | | | | | | | | | | | | | | | |
| Colletotrichum gloeosporioides | KAF3803768.1 | 2620 | 3729 | 4480 | 4933 | 5219 | 5373 | 5473 | | | | | | | | | | |
| Colletotrichum higginsianum | TIC93712.1 | 2621 | 3730 | | | | | | | | | | | | | | | |
| Colletotrichum higginsianum | TIC93712.1 | 2622 | 3731 | | | | | | | | | | | | | | | |
| Colletotrichum | OBR04629.1 | 2623 | 3732 | | | | | | | | | | | | | | | |
| higginsianum IMI 349063 | | | | | | | | | | | | | | | | | | |
| Colletotrichum | OBR04629.1 | 2624 | 3733 | | | | | | | | | | | | | | | |
| higginsianum IMI 349063 | | | | | | | | | | | | | | | | | | |
| Colletotrichum orchidophilum | OHF03557.1 | 2625 | 3734 | | | | | | | | | | | | | | | |
| Colletotrichum orchidophilum | OHF03557.1 | 2626 | 3735 | | | | | | | | | | | | | | | |
| Colletotrichum orchidophilum | OHF03557.1 | 2627 | 3736 | | | | | | | | | | | | | | | |
| Colletotrichum salicis | KXH61308.1 | 2628 | 3737 | | | | | | | | | | | | | | | |
| Colletotrichum salicis | KXH61308.1 | 2629 | 3738 | | | | | | | | | | | | | | | |
| Colletotrichum salicis | KXH61308.1 | 2630 | 3739 | | | | | | | | | | | | | | | |
| Colletotrichum shisoi | TQN69737.1 | 2631 | 3740 | | | | | | | | | | | | | | | |
| Colletotrichum shisoi | TQN69737.1 | 2632 | 3741 | | | | | | | | | | | | | | | |
| Colletotrichum shisoi | TQN69737.1 | 2633 | 3742 | | | | | | | | | | | | | | | |
| Colletotrichum siamense | KAF4825665.1 | 2634 | 3743 | 4546 | 4979 | 5221 | 5383 | | | | | | | | | | | |
| Colletotrichum siamense | KAF4843307.1 | 2635 | 3744 | 4605 | 4987 | 5224 | 5381 | | | | | | | | | | | |
| Colletotrichum siamense | KAF4858997.1 | 2636 | 3745 | 4606 | 4988 | 5225 | 5382 | | | | | | | | | | | |
| Colletotrichum siamense | KAF4872975.1 | 2637 | 3746 | | | | | | | | | | | | | | | |
| Colletotrichum siamense | KAF4872975.1 | 2638 | 3747 | 4547 | 4986 | 5243 | | | | | | | | | | | | |
| Colletotrichum siamense | KAF4817053.1 | 2639 | 3748 | 4754 | 5072 | 5273 | 5430 | 5497 | | | | | | | | | | |
| Colletotrichum tanaceti | TKW50855.1 | 2640 | 3749 | | | | | | | | | | | | | | | |
| Colletotrichum tanaceti | TKW50855.1 | 2641 | 3750 | | | | | | | | | | | | | | | |
| Colletotrichum tanaceti | TKW50855.1 | 2642 | 3751 | | | | | | | | | | | | | | | |
| Colletotrichum tropicale | KAF4835861.1 | 2643 | 3752 | 4742 | 5062 | 5267 | 5402 | | | | | | | | | | | |
| Colletotrichum viniferum | KAF4917890.1 | 2644 | 3753 | | | | | | | | | | | | | | | |
| Colletotrichum viniferum | KAF4917890.1 | 2645 | 3754 | 4607 | 4991 | | | | | | | | | | | | | |
| Coniella lustricola | PSR86972.1 | 2646 | 3755 | 4808 | 5111 | 5290 | 5410 | 5494 | 5548 | 5590 | | | | | | | | |
| Coniella lustricola | PSR86972.1 | 2647 | 3756 | 4809 | 5112 | 5291 | 5411 | 5495 | 5549 | 5589 | 5619 | | | | | | | |
| Coniella lustricola | PSR86972.1 | 2648 | 3757 | 4815 | 5113 | 5292 | 5429 | 5499 | 5550 | | | | | | | | | |
| Coniochaeta ligniaria | OIW34577.1 | 2649 | 3758 | 4732 | 5057 | | | | | | | | | | | | | |
| NRRL 30616 | | | | | | | | | | | | | | | | | | |
| Coniochaeta pulveracea | RKU46130.1 | 2650 | 3759 | | | | | | | | | | | | | | | |
| Coniochaeta pulveracea | RKU46130.1 | 2651 | 3760 | 4491 | | | | | | | | | | | | | | |
| Coniochaeta pulveracea | RKU46130.1 | 2652 | 3761 | | | | | | | | | | | | | | | |
| Coniochaeta pulveracea | RKU46130.1 | 2653 | 3762 | | | | | | | | | | | | | | | |
| Coniochaeta pulveracea | RKU46130.1 | 2654 | 3763 | 4542 | | | | | | | | | | | | | | |
| Coniochaeta pulveracea | RKU46130.1 | 2655 | 3764 | 4610 | | | | | | | | | | | | | | |
| Coniochaeta pulveracea | RKU46130.1 | 2656 | 2765 | | | | | | | | | | | | | | | |
| Coniochaeta pulveracea | RKU46130.1 | 2657 | 3766 | | | | | | | | | | | | | | | |
| Coniochaeta sp. 2T2.1 | KAB5551105.1 | 2658 | 3767 | | | | | | | | | | | | | | | |
| Coniochaeta sp. 2T2.1 | KAB5551105.1 | 2659 | 3768 | | | | | | | | | | | | | | | |
| Coniochaeta sp. 2T2.1 | KAB5551105.1 | 2660 | 3769 | | | | | | | | | | | | | | | |
| Coniochaeta sp. 2T2.1 | KAB5551105.1 | 2661 | 3770 | | | | | | | | | | | | | | | |
| Coniochaeta sp. 2T2.1 | KAB5551105.1 | 2662 | 3771 | | | | | | | | | | | | | | | |
| Coniochaeta sp. 2T2.1 | KAB5580195.1 | 2663 | 3772 | | | | | | | | | | | | | | | |
| Coniochaeta sp. 2T2.1 | KAB5580195.1 | 2664 | 3773 | 4849 | 5148 | | | | | | | | | | | | | |
| Coniochaeta sp. 2T2.1 | KAB5580195.1 | 2665 | 3774 | | | | | | | | | | | | | | | |
| Coniochaeta sp. 2T2.1 | KAB5580195.1 | 2666 | 3775 | | | | | | | | | | | | | | | |
| Coniochaeta sp. 2T2.1 | KAB5580195.1 | 2667 | 3776 | 4863 | | | | | | | | | | | | | | |
| Coniosporium apollinis | EON69158.1 | 2668 | 3777 | | | | | | | | | | | | | | | |
| CBS 100218 | | | | | | | | | | | | | | | | | | |
| Coniosporium apollinis | EON69158.1 | 2669 | 3778 | | | | | | | | | | | | | | | |
| CBS 100218 | | | | | | | | | | | | | | | | | | |
| Coniosporium apollinis | EON69158.1 | 2670 | 3779 | | | | | | | | | | | | | | | |
| CBS 100218 | | | | | | | | | | | | | | | | | | |
| Coniosporium apollinis | EON69158.1 | 2671 | 3780 | | | | | | | | | | | | | | | |
| CBS 100218 | | | | | | | | | | | | | | | | | | |
| Cordyceps fumosorosea | OAA60883.1 | 2672 | 3781 | 4628 | | | | | | | | | | | | | | |
| ARSEF 2679 | | | | | | | | | | | | | | | | | | |
| Cordyceps fumosorosea | OAA60883.1 | 2673 | 3782 | 4637 | | | | | | | | | | | | | | |
| ARSEF 2679 | | | | | | | | | | | | | | | | | | |
| Cordyceps fumosorosea | OAA60883.1 | 2674 | 3783 | 4608 | | | | | | | | | | | | | | |
| ARSEF 2679 | | | | | | | | | | | | | | | | | | |
| Cordyceps militaris | ATY63712.1 | 2675 | 3784 | | | | | | | | | | | | | | | |
| Cordyceps militaris | ATY63712.1 | 2676 | 3785 | | | | | | | | | | | | | | | |
| Cordyceps militaris | ATY63712.1 | 2677 | 3786 | | | | | | | | | | | | | | | |
| Cryomyces minteri | TKA66690.1 | 2678 | 3787 | | | | | | | | | | | | | | | |
| Cryomyces minteri | TKA66690.1 | 2679 | 3788 | 4623 | | | | | | | | | | | | | | |
| Cryphonectria parasitica | KAF3762650.1 | 2680 | 3789 | | | | | | | | | | | | | | | |
| EP155 | | | | | | | | | | | | | | | | | | |
| Cryphonectria parasitica | KAF3762650.1 | 2681 | 3790 | 4560 | 4954 | 5200 | 5359 | 5454 | 5536 | | | | | | | | | |
| EP155 | | | | | | | | | | | | | | | | | | |
| Cryphonectria parasitica | KAF3762650.1 | 2682 | 3791 | 4541 | 4953 | 5196 | 5358 | 5466 | 5535 | 5579 | | | | | | | | |
| EP155 | | | | | | | | | | | | | | | | | | |
| Cryphonectria parasitica | KAF3762650.1 | 2683 | 3792 | 4565 | 4960 | 5201 | 5360 | 5467 | | | | | | | | | | |
| EP155 | | | | | | | | | | | | | | | | | | |
| Cytospora leucostoma | ROW02039.1 | 2684 | 3793 | | | | | | | | | | | | | | | |
| Cytospora leucostoma | ROW02039.1 | 2685 | 3794 | 4807 | 5105 | 5285 | 5405 | | | | | | | | | | | |
| Delitschia confertaspora | KAF2197766.1 | 2686 | 3795 | | | | | | | | | | | | | | | |
| ATCC 74209 | | | | | | | | | | | | | | | | | | |
| Delitschia confertaspora | KAF2197766.1 | 2687 | 3796 | 4640 | | | | | | | | | | | | | | |
| ATCC 74209 | | | | | | | | | | | | | | | | | | |
| Delitschia confertaspora | KAF2197766.1 | 2688 | 3797 | 4526 | 4993 | | | | | | | | | | | | | |
| ATCC 74209 | | | | | | | | | | | | | | | | | | |
| Diaporthe ampelina | KKY30715.1 | 2689 | 3798 | | | | | | | | | | | | | | | |
| Diaporthe ampelina | KKY30715.1 | 2690 | 3799 | | | | | | | | | | | | | | | |
| Diaporthe ampelina | KKY30715.1 | 2691 | 3800 | 4859 | 5137 | 5311 | 5427 | 5493 | | | | | | | | | | |
| Diaporthe ampelina | KKY30715.1 | 2692 | 3801 | 4860 | 5138 | 5312 | 5428 | | | | | | | | | | | |
| Diaporthe helianthi | POS74470.1 | 2693 | 3802 | | | | | | | | | | | | | | | |
| Diaporthe helianthi | POS74470.1 | 2694 | 3803 | | | | | | | | | | | | | | | |
| Diaporthe helianthi | POS74470.1 | 2695 | 3804 | 4563 | 4958 | 5197 | 5357 | | | | | | | | | | | |
| Diaporthe helianthi | POS74470.1 | 2696 | 3805 | 4479 | 4932 | 5198 | 5374 | | | | | | | | | | | |
| Diplocarpon rosae | PBP22901.1 | 2697 | 3806 | 4704 | 5039 | 5257 | 5399 | 5506 | | | | | | | | | | |
| Diplocarpon rosae | PBP22901.1 | 2698 | 3807 | | | | | | | | | | | | | | | |
| Diplocarpon rosae | PBP22901.1 | 2699 | 3808 | | | | | | | | | | | | | | | |
| Diplocarpon rosae | PBP22837.1 | 2700 | 3809 | 4703 | 5038 | 5256 | 5400 | | | | | | | | | | | |
| Diplodia corticola | OJD32371.1 | 2701 | 3810 | | | | | | | | | | | | | | | |
| Diplodia corticola | OJD32371.1 | 2702 | 3811 | 4877 | 5159 | 5339 | | | | | | | | | | | | |
| Diplodia corticola | OJD32371.1 | 2703 | 3812 | 4876 | 5158 | 5338 | | | | | | | | | | | | |
| Dothistroma septosporum | EME39369.1 | 2704 | 3813 | | | | | | | | | | | | | | | |
| NZE10 | | | | | | | | | | | | | | | | | | |
| Dothistroma septosporum | EME39369.1 | 2705 | 3814 | | | | | | | | | | | | | | | |
| NZE10 | | | | | | | | | | | | | | | | | | |
| Dothistroma septosporum | EME39369.1 | 2706 | 3815 | 4684 | 5033 | 5254 | 5397 | 5479 | 5543 | 5586 | 5618 | 5646 | 5665 | 5679 | 5687 | 5694 | | |
| NZE10 | | | | | | | | | | | | | | | | | | |
| Dothistroma septosporum | EME39369.1 | 2707 | 3816 | | | | | | | | | | | | | | | |
| NZE10 | | | | | | | | | | | | | | | | | | |
| Dothistroma septosporum | EME39369.1 | 2708 | 3817 | | | | | | | | | | | | | | | |
| NZE10 | | | | | | | | | | | | | | | | | | |
| Dothistroma septosporum | EME39369.1 | 2709 | 3818 | 4259 | 4944 | 5188 | 5356 | 5453 | 5517 | 5570 | 5603 | 5633 | 5657 | 5674 | 5682 | 5690 | | |
| NZE10 | | | | | | | | | | | | | | | | | | |
| Drechmeria coniospora | KYK56087.1 | 2710 | 3819 | 4763 | | | | | | | | | | | | | | |
| Drechmeria coniospora | KYK56087.1 | 2711 | 3820 | 4758 | 5075 | | | | | | | | | | | | | |
| Drechmeria coniospora | KYK56087.1 | 2712 | 3821 | 4759 | 5076 | | | | | | | | | | | | | |
| Drechmeria coniospora | ODA77761.1 | 2713 | 3822 | 4611 | | | | | | | | | | | | | | |
| Drechmeria coniospora | ODA77761.1 | 2714 | 3823 | 4574 | 5012 | | | | | | | | | | | | | |
| Drechmeria coniospora | ODA77761.1 | 2715 | 3824 | 4582 | 5027 | | | | | | | | | | | | | |
| Drepanopeziza brunnea f. | EKD17274.1 | 2716 | 3825 | 4708 | 5152 | 5327 | | | | | | | | | | | | |
| sp. ‘multigermtubi’ MB_m1 | | | | | | | | | | | | | | | | | | |
| Escovopsis weberi | KOS21127.1 | 2717 | 3826 | | | | | | | | | | | | | | | |
| Escovopsis weberi | KOS21127.1 | 2718 | 3827 | | | | | | | | | | | | | | | |
| Escovopsis weberi | KOS21127.1 | 2719 | 3828 | | | | | | | | | | | | | | | |
| Escovopsis weberi | KOS21127.1 | 2720 | 3829 | 4736 | 5061 | | | | | | | | | | | | | |
| Escovopsis weberi | KOS21127.1 | 2721 | 3830 | | | | | | | | | | | | | | | |
| Escovopsis weberi | KOS21127.1 | 2722 | 3831 | 4737 | | | | | | | | | | | | | | |
| Escovopsis weberi | KOS21127.1 | 2723 | 3832 | | | | | | | | | | | | | | | |
| Gaeumannomyces tritici | EJT72500.1 | 2724 | 3833 | | | | | | | | | | | | | | | |
| R3-111a-1 | | | | | | | | | | | | | | | | | | |
| Gaeumannomyces tritici | EJT72500.1 | 2725 | 3834 | | | | | | | | | | | | | | | |
| R3-111a-1 | | | | | | | | | | | | | | | | | | |
| Gaeumannomyces tritici | EJT72500.1 | 2726 | 3835 | | | | | | | | | | | | | | | |
| R3-111a-1 | | | | | | | | | | | | | | | | | | |
| Gaeumannomyces tritici | EJT72500.1 | 2727 | 3836 | | | | | | | | | | | | | | | |
| R3-111a-1 | | | | | | | | | | | | | | | | | | |
| Gaeumannomyces tritici | EJT72500.1 | 2728 | 3837 | | | | | | | | | | | | | | | |
| R3-111a-1 | | | | | | | | | | | | | | | | | | |
| Gaeumannomyces tritici | EJT72500.1 | 2729 | 3838 | | | | | | | | | | | | | | | |
| R3-111a-1 | | | | | | | | | | | | | | | | | | |
| Gaeumannomyces tritici | EJT72500.1 | 2730 | 3839 | | | | | | | | | | | | | | | |
| R3-111a-1 | | | | | | | | | | | | | | | | | | |
| Gaeumannomyces tritici | EJT72500.1 | 2731 | 3840 | | | | | | | | | | | | | | | |
| R3-111a-1 | | | | | | | | | | | | | | | | | | |
| Glarea lozoyensis 74030 | EHL02023.1 | 2732 | 3841 | 4887 | | | | | | | | | | | | | | |
| Glarea lozoyensis 74030 | EHL02023.1 | 2733 | 3842 | 4884 | | | | | | | | | | | | | | |
| Glarea lozoyensis 74030 | EHL02023.1 | 2734 | 3843 | 4885 | | | | | | | | | | | | | | |
| Glarea lozoyensis ATCC | EPE28052.1 | 2735 | 3844 | 4888 | | | | | | | | | | | | | | |
| 20868 | | | | | | | | | | | | | | | | | | |
| Glarea lozoyensis ATCC | EPE28052.1 | 2736 | 3845 | 4883 | 5160 | | | | | | | | | | | | | |
| 20868 | | | | | | | | | | | | | | | | | | |
| Glarea lozoyensis ATCC | EPE28052.1 | 2737 | 3846 | 4886 | | | | | | | | | | | | | | |
| 20868 | | | | | | | | | | | | | | | | | | |
| Glonium stellatum | OCL15332.1 | 2738 | 3847 | | | | | | | | | | | | | | | |
| Glonium stellatum | OCL15332.1 | 2739 | 3848 | 4686 | 5035 | | | | | | | | | | | | | |
| Grosmannia clavigera | EFW99502.1 | 2740 | 3849 | | | | | | | | | | | | | | | |
| kw1407 | | | | | | | | | | | | | | | | | | |
| Grosmannia clavigera | EFW99502.1 | 2741 | 3850 | | | | | | | | | | | | | | | |
| kw1407 | | | | | | | | | | | | | | | | | | |
| Helotiales sp. | KAE8446876.1 | 2742 | 3851 | 4503 | 4904 | | | | | | | | | | | | | |
| DMI_Dod_QoI | | | | | | | | | | | | | | | | | | |
| Helotiales sp. | KAE8446876.1 | 2743 | 3852 | | | | | | | | | | | | | | | |
| DMI_Dod_QoI | | | | | | | | | | | | | | | | | | |
| Helotiales sp. | KAE8446876.1 | 2744 | 3853 | 4585 | 4996 | 5332 | | | | | | | | | | | | |
| DMI_Dod_QoI | | | | | | | | | | | | | | | | | | |
| Hyaloscypha bicolor E | PMD52247.1 | 2745 | 3854 | 4866 | 5151 | 5326 | 5437 | | | | | | | | | | | |
| Hyaloscypha bicolor E | PMD52247.1 | 2746 | 3855 | | | | | | | | | | | | | | | |
| Hyaloscypha hepaticicola | PMD19774.1 | 2747 | 3856 | | | | | | | | | | | | | | | |
| Hyaloscypha hepaticicola | PMD19774.1 | 2748 | 3857 | | | | | | | | | | | | | | | |
| Hyaloscypha hepaticicola | PMD19774.1 | 2749 | 3858 | | | | | | | | | | | | | | | |
| Lachnellula hyalina | TVY28938.1 | 2750 | 3859 | 4676 | | | | | | | | | | | | | | |
| Lachnellula hyalina | TVY28938.1 | 2751 | 3860 | 4668 | | | | | | | | | | | | | | |
| Lachnellula hyalina | TVY28938.1 | 2752 | 3861 | | | | | | | | | | | | | | | |
| Lachnellula hyalina | TVY28938.1 | 2753 | 3862 | | | | | | | | | | | | | | | |
| Lachnellula hyalina | TVY28938.1 | 2754 | 3863 | | | | | | | | | | | | | | | |
| Lachnellula occidentalis | TVY33705.1 | 2755 | 3864 | | | | | | | | | | | | | | | |
| Lachnellula occidentalis | TVY33705.1 | 2756 | 3865 | 4615 | | | | | | | | | | | | | | |
| Lachnellula occidentalis | TVY33705.1 | 2757 | 3866 | 4666 | | | | | | | | | | | | | | |
| Lachnellula subtilissima | TVY31325.1 | 2758 | 3867 | 4617 | 5026 | | | | | | | | | | | | | |
| Lachnellula subtilissima | TVY31325.1 | 2759 | 3868 | | | | | | | | | | | | | | | |
| Lachnellula subtilissima | TVY31325.1 | 2760 | 3869 | | | | | | | | | | | | | | | |
| Lachnellula subtilissima | TVY31325.1 | 2761 | 3870 | 4667 | | | | | | | | | | | | | | |
| Lachnellula suecica | TVY60901.1 | 2762 | 3871 | 4871 | | | | | | | | | | | | | | |
| Lachnellula suecica | TVY60901.1 | 2763 | 3872 | 4872 | | | | | | | | | | | | | | |
| Lachnellula suecica | TVY60901.1 | 2764 | 3873 | 4873 | | | | | | | | | | | | | | |
| Lachnellula suecica | TVY60901.1 | 2765 | 3874 | 4655 | | | | | | | | | | | | | | |
| Lachnellula willkommii | TVY86521.1 | 2766 | 3875 | 4616 | 5025 | | | | | | | | | | | | | |
| Lachnellula willkommii | TVY86521.1 | 2767 | 3876 | 4630 | | | | | | | | | | | | | | |
| Lachnellula willkommii | TVY86521.1 | 2768 | 3877 | | | | | | | | | | | | | | | |
| Lachnellula willkommii | TVY86521.1 | 2769 | 3878 | | | | | | | | | | | | | | | |
| Lasallia pustulata | KAA64153671 | 2770 | 3879 | 4639 | | | | | | | | | | | | | | |
| Lasallia pustulata | KAA6415367.1 | 2771 | 3880 | | | | | | | | | | | | | | | |
| Lasallia pustulata | KAA6415367.1 | 2772 | 3881 | | | | | | | | | | | | | | | |
| Lasallia pustulata | SLM33497.1 | 2773 | 3882 | | | | | | | | | | | | | | | |
| Lasallia pustulata | SLM33497.1 | 2774 | 3883 | | | | | | | | | | | | | | | |
| Lasallia pustulata | SLM33497.1 | 2775 | 3884 | | | | | | | | | | | | | | | |
| Lasallia pustulata | SLM33497.1 | 2776 | 3885 | | | | | | | | | | | | | | | |
| Lasiodiplodia theobromae | KAB2570072.1 | 2777 | 3886 | | | | | | | | | | | | | | | |
| Lasiodiplodia theobromae | KAB2570072.1 | 2778 | 3887 | 4483 | 4894 | 5213 | 5385 | | | | | | | | | | | |
| Lasiodiplodia theobromae | KAB2570072.1 | 2779 | 3888 | 4598 | 4976 | 5211 | 5440 | | | | | | | | | | | |
| Lasiodiplodia theobromae | KAF4536744.1 | 2780 | 3889 | | | | | | | | | | | | | | | |
| Lasiodiplodia theobromae | KAF4536744.1 | 2781 | 3890 | 4484 | 4895 | 5214 | 5386 | | | | | | | | | | | |
| Lasiodiplodia theobromae | KAF4536744.1 | 2782 | 3891 | 4599 | 4977 | 5212 | 5441 | | | | | | | | | | | |
| Letharia columbiana | KAF6235908.1 | 2783 | 3892 | | | | | | | | | | | | | | | |
| Letharia columbiana | KAF6235908.1 | 2784 | 3893 | | | | | | | | | | | | | | | |
| Letharia columbiana | KAF6235908.1 | 2785 | 3894 | | | | | | | | | | | | | | | |
| Letharia columbiana | KAF6235908.1 | 2786 | 3895 | | | | | | | | | | | | | | | |
| Letharia columbiana | KAF6235908.1 | 2787 | 3896 | | | | | | | | | | | | | | | |
| Lindgomyces ingoldianus | KAF2474749.1 | 2788 | 3897 | | | | | | | | | | | | | | | |
| Lindgomyces ingoldianus | KAF2474749.1 | 2789 | 3898 | 4527 | 4974 | 5210 | | | | | | | | | | | | |
| Lindgomyces ingoldianus | KAF2474749.1 | 2790 | 3899 | 4528 | | | | | | | | | | | | | | |
| Lindgomyces ingoldianus | KAF2474749.1 | 2791 | 3900 | 4493 | 4915 | 5193 | | | | | | | | | | | | |
| Lindgomyces ingoldianus | KAF2474749.1 | 2792 | 3901 | 4494 | 4916 | 5194 | | | | | | | | | | | | |
| Lindgomyces ingoldianus | KAF2474749.1 | 2793 | 3902 | | | | | | | | | | | | | | | |
| Lineolata rhizophorae | KAF2456623.1 | 2794 | 3903 | | | | | | | | | | | | | | | |
| Lineolata rhizophorae | KAF2456623.1 | 2795 | 3904 | | | | | | | | | | | | | | | |
| Lineolata rhizophorae | KAF2456623.1 | 2796 | 3905 | | | | | | | | | | | | | | | |
| Lineolata rhizophorae | KAF2456623.1 | 2797 | 3906 | | | | | | | | | | | | | | | |
| Lineolata rhizophorae | KAF2456623.1 | 2798 | 3907 | | | | | | | | | | | | | | | |
| Lophiostoma macrostomum | KAF2657304.1 | 2799 | 3908 | 4509 | 4909 | 5234 | 5379 | 5472 | | | | | | | | | | |
| CBS 122681 | | | | | | | | | | | | | | | | | | |
| Lophiotrema nucula | KAF2109031.1 | 2800 | 3909 | | | | | | | | | | | | | | | |
| Lophiotrema nucula | KAF2109031.1 | 2801 | 3910 | | | | | | | | | | | | | | | |
| Lophiotrema nucula | KAF2109031.1 | 2802 | 3911 | | | | | | | | | | | | | | | |
| Lophiotrema nucula | KAF2109031.1 | 2803 | 3912 | 4698 | | | | | | | | | | | | | | |
| Lophiotrema nucula | KAF2109031.1 | 2804 | 3913 | 4699 | 5037 | | | | | | | | | | | | | |
| Lophium mytilinum | KAF2499287.1 | 2805 | 3914 | 4649 | 5010 | 5241 | 5388 | 5474 | 5538 | 5584 | | | | | | | | |
| Lophium mytilinum | KAF2499287.1 | 2806 | 3915 | 4515 | 4912 | 5242 | 5380 | | | | | | | | | | | |
| Lophium mytilinum | KAF2499287.1 | 2807 | 3916 | | | | | | | | | | | | | | | |
| Lophium mytilinum | KAF2499287.1 | 2808 | 3917 | 4650 | 5011 | | | | | | | | | | | | | |
| Madurella mycetomatis | KXX80798.1 | 2809 | 3918 | | | | | | | | | | | | | | | |
| Madurella mycetomatis | KXX80798.1 | 2810 | 3919 | | | | | | | | | | | | | | | |
| Madurella mycetomatis | KXX80798.1 | 2811 | 3920 | | | | | | | | | | | | | | | |
| Madurella mycetomatis | KXX80798.1 | 2812 | 3921 | | | | | | | | | | | | | | | |
| Madurella mycetomatis | KXX80798.1 | 2813 | 3922 | | | | | | | | | | | | | | | |
| Madurella mycetomatis | KXX80798.1 | 2814 | 3923 | | | | | | | | | | | | | | | |
| Madurella mycetomatis | KXX80798.1 | 2815 | 3924 | 4764 | | | | | | | | | | | | | | |
| Madurella mycetomatis | KXX80798.1 | 2816 | 3925 | 4744 | 5064 | 5274 | | | | | | | | | | | | |
| Madurella mycetomatis | KXX80798.1 | 2817 | 3926 | 4745 | 5079 | | | | | | | | | | | | | |
| Madurella mycetomatis | KXX80798.1 | 2818 | 3927 | 4746 | 5078 | 5275 | | | | | | | | | | | | |
| Marssonina coronariae | OWP04968.1 | 2819 | 3928 | 4504 | 4903 | | | | | | | | | | | | | |
| Marssonina coronariae | OWP04968.1 | 2820 | 3929 | 4627 | | | | | | | | | | | | | | |
| Marssonina coronariae | OWP04968.1 | 2821 | 3930 | | | | | | | | | | | | | | | |
| Massarina eburnea CBS | KAF2645689.1 | 2822 | 3931 | 4600 | | | | | | | | | | | | | | |
| 473.64 | | | | | | | | | | | | | | | | | | |
| Massarina eburnea CBS | KAF2645689.1 | 2823 | 3932 | 4658 | | | | | | | | | | | | | | |
| 473.64 | | | | | | | | | | | | | | | | | | |
| Massarina eburnea CBS | KAF2645689.1 | 2824 | 3933 | 4657 | | | | | | | | | | | | | | |
| 473.64 | | | | | | | | | | | | | | | | | | |
| Melanomma pulvis-pyrius | KAF2795620.1 | 2825 | 3934 | 4700 | | | | | | | | | | | | | | |
| CBS 109.77 | | | | | | | | | | | | | | | | | | |
| Melanomma pulvis-pyrius | KAF2795620.1 | 2826 | 3935 | 4696 | | | | | | | | | | | | | | |
| CBS 109.77 | | | | | | | | | | | | | | | | | | |
| Melanomma pulvis-pyrius | KAF2795620.1 | 2827 | 3936 | 4701 | | | | | | | | | | | | | | |
| CBS 109.77 | | | | | | | | | | | | | | | | | | |
| Melanomma pulvis-pyrius | KAF2795620.1 | 2828 | 3937 | 4702 | | | | | | | | | | | | | | |
| CBS 109.77 | | | | | | | | | | | | | | | | | | |
| Metarhizium acridum | EFY84452.1 | 2829 | 3938 | | | | | | | | | | | | | | | |
| CQMa 102 | | | | | | | | | | | | | | | | | | |
| Metarhizium acridum | EFY84452.1 | 2830 | 3939 | 4851 | | | | | | | | | | | | | | |
| CQMa 102 | | | | | | | | | | | | | | | | | | |
| Metarhizium acridum | EFY84452.1 | 2831 | 3940 | 4850 | | | | | | | | | | | | | | |
| CQMa 102 | | | | | | | | | | | | | | | | | | |
| Metarhizium acridum | EFY84452.1 | 2832 | 3941 | | | | | | | | | | | | | | | |
| CQMa 102 | | | | | | | | | | | | | | | | | | |
| Metarhizium acridum | EFY84452.1 | 2833 | 3942 | | | | | | | | | | | | | | | |
| CQMa 102 | | | | | | | | | | | | | | | | | | |
| Metarhizium album ARSEF | KHN97959.1 | 2834 | 3943 | | | | | | | | | | | | | | | |
| 1941 | | | | | | | | | | | | | | | | | | |
| Metarhizium album ARSEF | KHN97959.1 | 2835 | 3944 | | | | | | | | | | | | | | | |
| 1941 | | | | | | | | | | | | | | | | | | |
| Metarhizium album ARSEF | KHN97959.1 | 2836 | 3945 | | | | | | | | | | | | | | | |
| 1941 | | | | | | | | | | | | | | | | | | |
| Metarhizium album ARSEF | KHN97959.1 | 2837 | 3946 | | | | | | | | | | | | | | | |
| 1941 | | | | | | | | | | | | | | | | | | |
| Metarhizium anisopliae | KAF5133551.1 | 2838 | 3947 | 4511 | 4940 | 5189 | 5392 | | | | | | | | | | | |
| Metarhizium anisopliae | KAF5133551.1 | 2839 | 3948 | 4512 | 4941 | 5250 | 5395 | 5498 | | | | | | | | | | |
| Metarhizium anisopliae | KAF5133551.1 | 2840 | 3949 | 4513 | 4942 | 5216 | 5393 | | | | | | | | | | | |
| Metarhizium anisopliae | KAF5133551.1 | 2841 | 3950 | 4514 | 4943 | 5217 | 5394 | | | | | | | | | | | |
| Metarhizium anisopliae | KFG78352.1 | 2842 | 3951 | | | | | | | | | | | | | | | |
| Metarhizium anisopliae | KFG78352.1 | 2843 | 3952 | | | | | | | | | | | | | | | |
| Metarhizium anisopliae | KFG78352.1 | 2844 | 3953 | | | | | | | | | | | | | | | |
| Metarhizium anisopliae | KFG78352.1 | 2845 | 3954 | | | | | | | | | | | | | | | |
| Metarhizium anisopliae | KID61826.1 | 2846 | 3955 | | | | | | | | | | | | | | | |
| ARSEF 549 | | | | | | | | | | | | | | | | | | |
| Metarhizium anisopliae | KID61826.1 | 2847 | 3956 | | | | | | | | | | | | | | | |
| ARSEF 549 | | | | | | | | | | | | | | | | | | |
| Metarhizium anisopliae | KID61826.1 | 2848 | 3957 | | | | | | | | | | | | | | | |
| ARSEF 549 | | | | | | | | | | | | | | | | | | |
| Metarhizium anisopliae | KID61826.1 | 2849 | 3958 | | | | | | | | | | | | | | | |
| ARSEF 549 | | | | | | | | | | | | | | | | | | |
| Metarhizium anisopliae | KJK92374.1 | 2850 | 3959 | | | | | | | | | | | | | | | |
| BRIP 53284 | | | | | | | | | | | | | | | | | | |
| Metarhizium anisopliae | KJK92374.1 | 2851 | 3960 | | | | | | | | | | | | | | | |
| BRIP 53284 | | | | | | | | | | | | | | | | | | |
| Metarhizium anisopliae | KJK92374.1 | 2852 | 3961 | | | | | | | | | | | | | | | |
| BRIP 53284 | | | | | | | | | | | | | | | | | | |
| Metarhizium anisopliae | KJK92374.1 | 2853 | 3962 | | | | | | | | | | | | | | | |
| BRIP 53284 | | | | | | | | | | | | | | | | | | |
| Metarhizium anisopliae | KJK92374.1 | 2854 | 3963 | | | | | | | | | | | | | | | |
| BRIP 53284 | | | | | | | | | | | | | | | | | | |
| Metarhizium anisopliae | KJK83512.1 | 2855 | 3964 | | | | | | | | | | | | | | | |
| BRIP 53293 | | | | | | | | | | | | | | | | | | |
| Metarhizium anisopliae | KJK83512.1 | 2856 | 3965 | | | | | | | | | | | | | | | |
| BRIP 53293 | | | | | | | | | | | | | | | | | | |
| Metarhizium anisopliae | KJK83512.1 | 2857 | 3966 | | | | | | | | | | | | | | | |
| BRIP 53293 | | | | | | | | | | | | | | | | | | |
| Metarhizium anisopliae | KJK83512.1 | 2858 | 3967 | | | | | | | | | | | | | | | |
| BRIP 53293 | | | | | | | | | | | | | | | | | | |
| Metarhizium anisopliae | KJK83512.1 | 2859 | 3968 | | | | | | | | | | | | | | | |
| BRIP 53293 | | | | | | | | | | | | | | | | | | |
| Metarhizium brunneum | QLI64013.1 | 2860 | 3969 | | | | | | | | | | | | | | | |
| Metarhizium brunneum | QLI64013.1 | 2861 | 3970 | | | | | | | | | | | | | | | |
| Metarhizium brunneum | QLI64013.1 | 2862 | 3971 | | | | | | | | | | | | | | | |
| Metarhizium brunneum | QLI64013.1 | 2863 | 3972 | | | | | | | | | | | | | | | |
| Metarhizium brunneum | QLI64013.1 | 2864 | 3973 | | | | | | | | | | | | | | | |
| Metarhizium brunneum | KID80709.1 | 2865 | 3974 | | | | | | | | | | | | | | | |
| ARSEF 3297 | | | | | | | | | | | | | | | | | | |
| Metarhizium brunneum | KID80709.1 | 2866 | 3975 | | | | | | | | | | | | | | | |
| ARSEF 3297 | | | | | | | | | | | | | | | | | | |
| Metarhizium brunneum | KID80709.1 | 2867 | 3976 | | | | | | | | | | | | | | | |
| ARSEF 3297 | | | | | | | | | | | | | | | | | | |
| Metarhizium brunneum | KID80709.1 | 2868 | 3977 | | | | | | | | | | | | | | | |
| ARSEF 3297 | | | | | | | | | | | | | | | | | | |
| Metarhizium brunneum | KID80709.1 | 2869 | 3978 | | | | | | | | | | | | | | | |
| ARSEF 3297 | | | | | | | | | | | | | | | | | | |
| Metarhizium guizhouense | KID90822.1 | 2870 | 3979 | | | | | | | | | | | | | | | |
| ARSEF 977 | | | | | | | | | | | | | | | | | | |
| Metarhizium guizhouense | KID90822.1 | 2871 | 3980 | | | | | | | | | | | | | | | |
| ARSEF 977 | | | | | | | | | | | | | | | | | | |
| Metarhizium guizhouense | KID90822.1 | 2872 | 3981 | | | | | | | | | | | | | | | |
| ARSEF 977 | | | | | | | | | | | | | | | | | | |
| Metarhizium guizhouense | KID90822.1 | 2873 | 3982 | | | | | | | | | | | | | | | |
| ARSEF 977 | | | | | | | | | | | | | | | | | | |
| Metarhizium majus ARSEF | KIE00973.1 | 2874 | 3983 | | | | | | | | | | | | | | | |
| 297 | | | | | | | | | | | | | | | | | | |
| Metarhizium majus ARSEF | KIE00973.1 | 2875 | 3984 | | | | | | | | | | | | | | | |
| 297 | | | | | | | | | | | | | | | | | | |
| Metarhizium majus ARSEF | KIE00973.1 | 2876 | 3985 | | | | | | | | | | | | | | | |
| 297 | | | | | | | | | | | | | | | | | | |
| Metarhizium rileyi | TWU78575.1 | 2877 | 3986 | | | | | | | | | | | | | | | |
| Metarhizium rileyi | TWU78575.1 | 2878 | 3987 | 4652 | | | | | | | | | | | | | | |
| Metarhizium rileyi | TWU78575.1 | 2879 | 3988 | 4561 | 5021 | | | | | | | | | | | | | |
| Metarhizium rileyi | TWU78575.1 | 2880 | 3989 | 4677 | | | | | | | | | | | | | | |
| Metarhizium rileyi RCEF | OAA43713.1 | 2881 | 3990 | | | | | | | | | | | | | | | |
| 4871 | | | | | | | | | | | | | | | | | | |
| Metarhizium rileyi RCEF | OAA43713.1 | 2882 | 3991 | 4653 | | | | | | | | | | | | | | |
| 4871 | | | | | | | | | | | | | | | | | | |
| Metarhizium rileyi RCEF | OAA43713.1 | 2883 | 3992 | 4562 | 5022 | | | | | | | | | | | | | |
| 4871 | | | | | | | | | | | | | | | | | | |
| Metarhizium rileyi RCEF | OAA43713.1 | 2884 | 3993 | 4678 | | | | | | | | | | | | | | |
| 4871 | | | | | | | | | | | | | | | | | | |
| Metarhizium robertsii | EXV00913.1 | 2885 | 3994 | | | | | | | | | | | | | | | |
| Metarhizium robertsii | EXV00913.1 | 2886 | 3995 | | | | | | | | | | | | | | | |
| Metarhizium robertsii | EXV00913.1 | 2887 | 3996 | | | | | | | | | | | | | | | |
| Metarhizium robertsii | EXV00913.1 | 2888 | 3997 | | | | | | | | | | | | | | | |
| Metarhizium robertsii | EFZ04110.1 | 2889 | 3998 | | | | | | | | | | | | | | | |
| ARSEF 23 | | | | | | | | | | | | | | | | | | |
| Metarhizium robertsii | EFZ04110.1 | 2890 | 3999 | | | | | | | | | | | | | | | |
| ARSEF 23 | | | | | | | | | | | | | | | | | | |
| Metarhizium robertsii | EFZ04110.1 | 2891 | 4000 | | | | | | | | | | | | | | | |
| ARSEF 23 | | | | | | | | | | | | | | | | | | |
| Metarhizium robertsii | EFZ04110.1 | 2892 | 4001 | | | | | | | | | | | | | | | |
| ARSEF 23 | | | | | | | | | | | | | | | | | | |
| Moelleriella libera RCEF | KZZ94271.1 | 2893 | 4002 | | | | | | | | | | | | | | | |
| 2490 | | | | | | | | | | | | | | | | | | |
| Moelleriella libera RCEF | KZZ94271.1 | 2894 | 4003 | | | | | | | | | | | | | | | |
| 2490 | | | | | | | | | | | | | | | | | | |
| Moelleriella libera RCEF | KZZ94271.1 | 2895 | 4004 | | | | | | | | | | | | | | | |
| 2490 | | | | | | | | | | | | | | | | | | |
| Mollisia scopiformis | KUJ22789.1 | 2896 | 4005 | 4505 | 4911 | | | | | | | | | | | | | |
| Mollisia scopiformis | KUJ22789.1 | 2897 | 4006 | | | | | | | | | | | | | | | |
| Mollisia scopiformis | KUJ22789.1 | 2898 | 4007 | 4486 | 4971 | | | | | | | | | | | | | |
| Monilinia fructicola | KAA8576226.1 | 2899 | 4008 | | | | | | | | | | | | | | | |
| Monilinia fructicola | KAA8576226.1 | 2900 | 4009 | 4525 | 4939 | 5232 | 5377 | 5478 | | | | | | | | | | |
| Monilinia fructicola | KAA8576226.1 | 2901 | 4010 | | | | | | | | | | | | | | | |
| Monilinia fructicola | KAA8576226.1 | 2902 | 4011 | 4588 | 5161 | | | | | | | | | | | | | |
| Monilinia fructicola | KAA8576226.1 | 2903 | 4012 | | | | | | | | | | | | | | | |
| Monilinia fructigena | RAL62545.1 | 2904 | 4013 | | | | | | | | | | | | | | | |
| Monilinia fructigena | RAL62545.1 | 2905 | 4014 | 4487 | 4897 | 5173 | 5355 | 5477 | | | | | | | | | | |
| Monilinia fructigena | RAL62545.1 | 2906 | 4015 | | | | | | | | | | | | | | | |
| Monilinia fructigena | RAL62545.1 | 2907 | 4016 | | | | | | | | | | | | | | | |
| Monilinia laxa | KAB8302934.1 | 2908 | 4017 | | | | | | | | | | | | | | | |
| Monilinia laxa | KAB8302934.1 | 2909 | 4018 | 4827 | 5119 | 5296 | 5417 | 5482 | | | | | | | | | | |
| Monilinia laxa | KAB8302934.1 | 2910 | 4019 | | | | | | | | | | | | | | | |
| Monilinia laxa | KAB8302934.1 | 2911 | 4020 | | | | | | | | | | | | | | | |
| Mytilinidion resinicola | KAF2810334.1 | 2912 | 4021 | 4685 | 5034 | 5255 | 5398 | 5480 | 5544 | 5587 | 5624 | | | | | | | |
| Mytilinidion resinicola | KAF2810334.1 | 2913 | 4022 | 4731 | 5056 | | | | | | | | | | | | | |
| Mytilinidion resinicola | KAF2810334.1 | 2914 | 4023 | | | | | | | | | | | | | | | |
| Mytilinidion resinicola | KAF2810334.1 | 2915 | 4024 | | | | | | | | | | | | | | | |
| Mytilinidion resinicola | KAF2810334.1 | 2916 | 4025 | 4661 | 5016 | 5245 | 5389 | | | | | | | | | | | |
| Mytilinidion resinicola | KAF2810334.1 | 2917 | 4026 | | | | | | | | | | | | | | | |
| Neofusicoccum parvum | EOD48838.1 | 2918 | 4027 | | | | | | | | | | | | | | | |
| UCRNP2 | | | | | | | | | | | | | | | | | | |
| Neofusicoccum parvum | EOD48838.1 | 2919 | 4028 | 4638 | 5005 | 5237 | | | | | | | | | | | | |
| UCRNP2 | | | | | | | | | | | | | | | | | | |
| Neofusicoccum parvum | EOD48838.1 | 2920 | 4029 | 4889 | | | | | | | | | | | | | | |
| UCRNP2 | | | | | | | | | | | | | | | | | | |
| Neofusicoccum parvum | EOD48838.1 | 2921 | 4030 | 4629 | | | | | | | | | | | | | | |
| UCRNP2 | | | | | | | | | | | | | | | | | | |
| Neonectria ditissima | KPM43150.1 | 2922 | 4031 | | | | | | | | | | | | | | | |
| Neonectria ditissima | KPM43150.1 | 2923 | 4032 | | | | | | | | | | | | | | | |
| Neonectria ditissima | KPM43150.1 | 2924 | 4033 | | | | | | | | | | | | | | | |
| Neonectria ditissima | KPM43150.1 | 2925 | 4034 | | | | | | | | | | | | | | | |
| Neonectria ditissima | KPM43150.1 | 2926 | 4035 | | | | | | | | | | | | | | | |
| Neurospora crassa | EAA35858.1 | 2927 | 4036 | 4569 | 4963 | 5235 | | | | | | | | | | | | |
| Neurospora crassa | EAA35858.1 | 2928 | 4037 | 4481 | 4961 | | | | | | | | | | | | | |
| Neurospora crassa | EAA35858.1 | 2929 | 4038 | 4576 | 4965 | | | | | | | | | | | | | |
| Neurospora crassa | EAA35858.1 | 2930 | 4039 | 4566 | 4955 | 5202 | | | | | | | | | | | | |
| Neurospora crassa | KHE89926.1 | 2931 | 4040 | 4570 | 4964 | 5236 | | | | | | | | | | | | |
| Neurospora crassa | KHE89926.1 | 2932 | 4041 | 4482 | 4962 | | | | | | | | | | | | | |
| Neurospora crassa | KHE89926.1 | 2933 | 4042 | 4577 | 4966 | | | | | | | | | | | | | |
| Neurospora crassa | KHE89926.1 | 2934 | 4043 | 4567 | 4956 | 5203 | | | | | | | | | | | | |
| Neurospora tetrasperma | EGO53172.1 | 2935 | 4044 | | | | | | | | | | | | | | | |
| FGSC 2508 | | | | | | | | | | | | | | | | | | |
| Neurospora tetrasperma | EGO53172.1 | 2936 | 4045 | 4792 | 5097 | 5283 | | | | | | | | | | | | |
| FGSC 2508 | | | | | | | | | | | | | | | | | | |
| Neurospora tetrasperma | EGO53172.1 | 2937 | 4046 | 4795 | 5099 | | | | | | | | | | | | | |
| FGSC 2508 | | | | | | | | | | | | | | | | | | |
| Neurospora tetrasperma | EGO53172.1 | 2938 | 4047 | 4796 | 5100 | | | | | | | | | | | | | |
| FGSC 2508 | | | | | | | | | | | | | | | | | | |
| Neurospora tetrasperma | EGO53172.1 | 2939 | 4048 | 4794 | 5098 | 5284 | | | | | | | | | | | | |
| FGSC 2508 | | | | | | | | | | | | | | | | | | |
| Neurospora tetrasperma | EGZ78015.1 | 2940 | 4049 | | | | | | | | | | | | | | | |
| FGSC 2509 | | | | | | | | | | | | | | | | | | |
| Neurospora tetrasperma | EGZ78015.1 | 2941 | 4050 | 4790 | 5095 | 5282 | 5404 | | | | | | | | | | | |
| FGSC 2509 | | | | | | | | | | | | | | | | | | |
| Neurospora tetrasperma | EGZ78015.1 | 2942 | 4051 | 4791 | | | | | | | | | | | | | | |
| FGSC 2509 | | | | | | | | | | | | | | | | | | |
| Neurospora tetrasperma | EGZ78015.1 | 2943 | 4052 | 4793 | 5096 | | | | | | | | | | | | | |
| FGSC 2509 | | | | | | | | | | | | | | | | | | |
| Neurospora tetrasperma | EGZ78015.1 | 2944 | 4053 | | | | | | | | | | | | | | | |
| FGSC 2509 | | | | | | | | | | | | | | | | | | |
| Ophiocordyceps camponoti- | KAF4594858.1 | 2945 | 4054 | | | | | | | | | | | | | | | |
| rufipedis | | | | | | | | | | | | | | | | | | |
| Ophiocordyceps camponoti- | KAF4594858.1 | 2946 | 4055 | 4710 | | | | | | | | | | | | | | |
| rufipedis | | | | | | | | | | | | | | | | | | |
| Ophiocordyceps camponoti- | KAF4594858.1 | 2947 | 4056 | 4549 | 4935 | 5184 | 5352 | 5450 | 5530 | 5575 | 5609 | 5643 | 5667 | | | | | |
| rufipedis | | | | | | | | | | | | | | | | | | |
| Ophiocordyceps camponoti- | KAF4594858.1 | 2948 | 4057 | 4550 | 4936 | 5185 | 5353 | 5451 | 5531 | 5576 | 5610 | 5644 | 5666 | | | | | |
| rufipedis | | | | | | | | | | | | | | | | | | |
| Ophiocordyceps camponoti- | KAF4594858.1 | 2949 | 4058 | 4551 | 4937 | 5186 | 5354 | 5452 | 5516 | 5574 | 5608 | 5642 | 5668 | | | | | |
| rufipedis | | | | | | | | | | | | | | | | | | |
| Ophiocordyceps camponoti- | KAF4594858.1 | 2950 | 4059 | 4597 | 4975 | 5215 | 5387 | 5475 | 5539 | 5588 | | | | | | | | |
| rufipedis | | | | | | | | | | | | | | | | | | |
| Ophiocordyceps camponoti- | KAF4594858.1 | 2951 | 4060 | 4548 | 4934 | 5183 | 5351 | 5449 | 5515 | 5569 | 5606 | 5636 | 5661 | 5678 | 5686 | | | |
| rufipedis | | | | | | | | | | | | | | | | | | |
| Ophiocordyceps camponoti- | PHH73426.1 | 2952 | 4061 | | | | | | | | | | | | | | | |
| rufipedis | | | | | | | | | | | | | | | | | | |
| Ophiocordyceps camponoti- | PHH73426.1 | 2953 | 4062 | | | | | | | | | | | | | | | |
| rufipedis | | | | | | | | | | | | | | | | | | |
| Ophiocordyceps camponoti- | PHH73426.1 | 2954 | 4063 | | | | | | | | | | | | | | | |
| rufipedis | | | | | | | | | | | | | | | | | | |
| Ophiocordyceps camponoti- | PHH73426.1 | 2955 | 4064 | 4552 | 4938 | 5187 | 5376 | | | | | | | | | | | |
| rufipedis | | | | | | | | | | | | | | | | | | |
| Ophiocordyceps camponoti- | PHH73426.1 | 2956 | 4065 | | | | | | | | | | | | | | | |
| rufipedis | | | | | | | | | | | | | | | | | | |
| Ophiocordyceps camponoti- | PHH73426.1 | 2957 | 4066 | 4656 | | | | | | | | | | | | | | |
| rufipedis | | | | | | | | | | | | | | | | | | |
| Ophiostoma piceae UAMH | EPE06372.1 | 2958 | 4067 | | | | | | | | | | | | | | | |
| 11346 | | | | | | | | | | | | | | | | | | |
| Ophiostoma piceae UAMH | EPE06372.1 | 2959 | 4068 | | | | | | | | | | | | | | | |
| 11346 | | | | | | | | | | | | | | | | | | |
| Ophiostoma piceae UAMH | EPE06372.1 | 2960 | 4069 | 4618 | 4995 | | | | | | | | | | | | | |
| 11346 | | | | | | | | | | | | | | | | | | |
| Penicilliopsis zonata CBS | OJJ47425.1 | 2961 | 4070 | | | | | | | | | | | | | | | |
| 506.65 | | | | | | | | | | | | | | | | | | |
| Penicilliopsis zonata CBS | OJJ47425.1 | 2962 | 4071 | | | | | | | | | | | | | | | |
| 506.65 | | | | | | | | | | | | | | | | | | |
| Penicillium antarcticum | OQD82645.1 | 2963 | 4072 | | | | | | | | | | | | | | | |
| Penicillium antarcticum | OQD82645.1 | 2964 | 4073 | | | | | | | | | | | | | | | |
| Penicillium arizonense | OGE48721.1 | 2965 | 4074 | | | | | | | | | | | | | | | |
| Penicillium arizonense | OGE48721.1 | 2966 | 4075 | | | | | | | | | | | | | | | |
| Penicillium brasilianum | CEJ54559.1 | 2967 | 4076 | | | | | | | | | | | | | | | |
| Penicillium brasilianum | CEJ54559.1 | 2968 | 4077 | | | | | | | | | | | | | | | |
| Penicillium brasilianum | CEJ54559.1 | 2969 | 4078 | | | | | | | | | | | | | | | |
| Penicillium brasilianum | OOQ86087.1 | 2970 | 4079 | | | | | | | | | | | | | | | |
| Penicillium brasilianum | OOQ86087.1 | 2971 | 4080 | | | | | | | | | | | | | | | |
| Penicillium brasilianum | OOQ86087.1 | 2972 | 4081 | | | | | | | | | | | | | | | |
| Penicillium chrysogenum | KZN90002.1 | 2973 | 4082 | | | | | | | | | | | | | | | |
| Penicillium chrysogenum | KZN90002.1 | 2974 | 4083 | | | | | | | | | | | | | | | |
| Penicillium decumbens | OQD70082.1 | 2975 | 4084 | | | | | | | | | | | | | | | |
| Penicillium decumbens | OQD70082.1 | 2976 | 4085 | | | | | | | | | | | | | | | |
| Penicillium digitatum | EKV10174.1 | 2977 | 4086 | | | | | | | | | | | | | | | |
| PHI26 | | | | | | | | | | | | | | | | | | |
| Penicillium digitatum | EKV10174.1 | 2978 | 4087 | | | | | | | | | | | | | | | |
| PHI26 | | | | | | | | | | | | | | | | | | |
| Penicillium digitatum Pd1 | EKV08521.1 | 2979 | 4088 | | | | | | | | | | | | | | | |
| Penicillium digitatum Pd1 | EKV08521.1 | 2980 | 4089 | | | | | | | | | | | | | | | |
| Penicillium rolfsii | KAF3394705.1 | 2981 | 4090 | | | | | | | | | | | | | | | |
| Penicillium rolfsii | KAF3394705.1 | 2982 | 4091 | | | | | | | | | | | | | | | |
| Penicillium roqueforti | CDM34959.1 | 2983 | 4092 | | | | | | | | | | | | | | | |
| FM164 | | | | | | | | | | | | | | | | | | |
| Penicillium roqueforti | CDM34959.1 | 2984 | 4093 | | | | | | | | | | | | | | | |
| FM164 | | | | | | | | | | | | | | | | | | |
| Penicillium steckii | OQE14207.1 | 2985 | 4094 | | | | | | | | | | | | | | | |
| Penicillium steckii | OQE14207.1 | 2986 | 4095 | | | | | | | | | | | | | | | |
| Penicillium subrubescens | OKP08594.1 | 2987 | 4096 | | | | | | | | | | | | | | | |
| Penicillium subrubescens | OKP08594.1 | 2988 | 4097 | | | | | | | | | | | | | | | |
| Penicillium subrubescens | OKP08594.1 | 2989 | 4098 | | | | | | | | | | | | | | | |
| Phaeoacremonium | EOO02638.1 | 2990 | 4099 | 4757 | | | | | | | | | | | | | | |
| minimum UCRPA7 | | | | | | | | | | | | | | | | | | |
| Phaeoacremonium | EOO02638.1 | 2991 | 4100 | 4740 | | | | | | | | | | | | | | |
| minimum UCRPA7 | | | | | | | | | | | | | | | | | | |
| Phaeoacremonium | EOO02638.1 | 2992 | 4101 | 4738 | 5074 | | | | | | | | | | | | | |
| minimum UCRPA7 | | | | | | | | | | | | | | | | | | |
| Phaeoacremonium | EOO02638.1 | 2993 | 4102 | 4739 | 5073 | | | | | | | | | | | | | |
| minimum UCRPA7 | | | | | | | | | | | | | | | | | | |
| Phialemoniopsis curvata | TPX15536.1 | 2994 | 4103 | 4787 | | | | | | | | | | | | | | |
| Phialemoniopsis curvata | TPX15536.1 | 2995 | 4104 | 4785 | 5086 | | | | | | | | | | | | | |
| Phialemoniopsis curvata | TPX15536.1 | 2996 | 4105 | 4786 | | | | | | | | | | | | | | |
| Phialocephala subalpina | CZR51131.1 | 2997 | 4106 | | | | | | | | | | | | | | | |
| Phialocephala subalpina | CZR51131.1 | 2998 | 4107 | | | | | | | | | | | | | | | |
| Phialocephala subalpina | CZR51131.1 | 2999 | 4108 | | | | | | | | | | | | | | | |
| Phialocephala subalpina | CZR51131.1 | 3000 | 4109 | | | | | | | | | | | | | | | |
| Phialocephala subalpina | CZR51131.1 | 3001 | 4110 | | | | | | | | | | | | | | | |
| Phialocephala subalpina | CZR51131.1 | 3002 | 4111 | | | | | | | | | | | | | | | |
| Pleomassaria siparia CBS | KAF2710460.1 | 3003 | 4112 | | | | | | | | | | | | | | | |
| 279.74 | | | | | | | | | | | | | | | | | | |
| Pleomassaria siparia CBS | KAF2710460.1 | 3004 | 4113 | | | | | | | | | | | | | | | |
| 279.74 | | | | | | | | | | | | | | | | | | |
| Pleomassaria siparia CBS | KAF2710460.1 | 3005 | 4114 | | | | | | | | | | | | | | | |
| 279.74 | | | | | | | | | | | | | | | | | | |
| Pleomassaria siparia CBS | KAF2710460.1 | 3006 | 4115 | | | | | | | | | | | | | | | |
| 279.74 | | | | | | | | | | | | | | | | | | |
| Pochonia chlamydosporia | RZR62407.1 | 3007 | 4116 | | | | | | | | | | | | | | | |
| 123 | | | | | | | | | | | | | | | | | | |
| Pochonia chlamydosporia | RZR62407.1 | 3008 | 4117 | | | | | | | | | | | | | | | |
| 123 | | | | | | | | | | | | | | | | | | |
| Pochonia chlamydosporia | RZR62407.1 | 3009 | 4118 | | | | | | | | | | | | | | | |
| 123 | | | | | | | | | | | | | | | | | | |
| Pochonia chlamydosporia | RZR62407.1 | 3010 | 4119 | 4853 | 5150 | | | | | | | | | | | | | |
| 123 | | | | | | | | | | | | | | | | | | |
| Pochonia chlamydosporia | RZR62407.1 | 3011 | 4120 | 4854 | 5149 | | | | | | | | | | | | | |
| 123 | | | | | | | | | | | | | | | | | | |
| Pochonia chlamydosporia | RZR62407.1 | 3012 | 4121 | | | | | | | | | | | | | | | |
| 123 | | | | | | | | | | | | | | | | | | |
| Pochonia chlamydosporia | OAQ71329.1 | 3013 | 4122 | | | | | | | | | | | | | | | |
| 170 | | | | | | | | | | | | | | | | | | |
| Pochonia chlamydosporia | OAQ71329.1 | 3014 | 4123 | | | | | | | | | | | | | | | |
| 170 | | | | | | | | | | | | | | | | | | |
| Pochonia chlamydosporia | OAQ71329.1 | 3015 | 4124 | | | | | | | | | | | | | | | |
| 170 | | | | | | | | | | | | | | | | | | |
| Pochonia chlamydosporia | OAQ71329.1 | 3016 | 4125 | 4865 | | | | | | | | | | | | | | |
| 170 | | | | | | | | | | | | | | | | | | |
| Pochonia chlamydosporia | OAQ71329.1 | 3017 | 4126 | 4864 | | | | | | | | | | | | | | |
| 170 | | | | | | | | | | | | | | | | | | |
| Pochonia chlamydosporia | OAQ71329.1 | 3018 | 4127 | 4855 | | | | | | | | | | | | | | |
| 170 | | | | | | | | | | | | | | | | | | |
| Pochonia chlamydosporia | OAQ71329.1 | 3019 | 4128 | 4856 | | | | | | | | | | | | | | |
| 170 | | | | | | | | | | | | | | | | | | |
| Podospora comata | VBB72273.1 | 3020 | 4129 | | | | | | | | | | | | | | | |
| Podospora comata | VBB72273.1 | 3021 | 4130 | | | | | | | | | | | | | | | |
| Podospora comata | VBB72273.1 | 3022 | 4131 | | | | | | | | | | | | | | | |
| Polychaeton citri CBS | KAF2725433.1 | 3023 | 4132 | | | | | | | | | | | | | | | |
| 116435 | | | | | | | | | | | | | | | | | | |
| Polyplosphaeria fusca | KAF2740445.1 | 3024 | 4133 | | | | | | | | | | | | | | | |
| Polyplosphaeria fusca | KAF2740445.1 | 3025 | 4134 | | | | | | | | | | | | | | | |
| Polyplosphaeria fusca | KAF2740445.1 | 3026 | 4135 | 4697 | 5036 | 5323 | | | | | | | | | | | | |
| Polyplosphaeria fusca | KAF2740445.1 | 3027 | 4136 | | | | | | | | | | | | | | | |
| Polyplosphaeria fusca | KAF2740445.1 | 3028 | 4137 | | | | | | | | | | | | | | | |
| Polyplosphaeria fusca | KAF2740445.1 | 3029 | 4138 | | | | | | | | | | | | | | | |
| Pseudogymnoascus destructans | OAF56923.1 | 3030 | 4139 | | | | | | | | | | | | | | | |
| Pseudogymnoascus destructans | OAF56923.1 | 3031 | 4140 | | | | | | | | | | | | | | | |
| Pseudogymnoascus destructans | OAF56923.1 | 3032 | 4141 | | | | | | | | | | | | | | | |
| Pseudogymnoascus destructans | OAF56923.1 | 3033 | 4142 | | | | | | | | | | | | | | | |
| Pseudogymnoascus destructans | OAF56923.1 | 3034 | 4143 | | | | | | | | | | | | | | | |
| Pseudogymnoascus | ELR03405.1 | 3035 | 4144 | | | | | | | | | | | | | | | |
| destructans 20631-21 | | | | | | | | | | | | | | | | | | |
| Pseudogymnoascus | ELR03405.1 | 3036 | 4145 | | | | | | | | | | | | | | | |
| destructans 20631-21 | | | | | | | | | | | | | | | | | | |
| Pseudogymnoascus | ELR03405.1 | 3037 | 4146 | | | | | | | | | | | | | | | |
| destructans 20631-21 | | | | | | | | | | | | | | | | | | |
| Pseudogymnoascus | ELR03405.1 | 3038 | 4147 | | | | | | | | | | | | | | | |
| destructans 20631-21 | | | | | | | | | | | | | | | | | | |
| Pseudogymnoascus | ELR03405.1 | 3039 | 4148 | | | | | | | | | | | | | | | |
| destructans 20631-21 | | | | | | | | | | | | | | | | | | |
| Pseudogymnoascus sp. | OBT90158.1 | 3040 | 4149 | 4723 | 5155 | 5331 | | | | | | | | | | | | |
| 03VT05 | | | | | | | | | | | | | | | | | | |
| Pseudogymnoascus sp. | OBT90158.1 | 3041 | 4150 | 4714 | 5046 | 5330 | | | | | | | | | | | | |
| 03VT05 | | | | | | | | | | | | | | | | | | |
| Pseudogymnoascus sp. | OBT90158.1 | 3042 | 4151 | 4535 | 4930 | | | | | | | | | | | | | |
| 03VT05 | | | | | | | | | | | | | | | | | | |
| Pseudogymnoascus sp. | OBT77860.1 | 3043 | 4152 | 4724 | 5156 | | | | | | | | | | | | | |
| 05NY08 | | | | | | | | | | | | | | | | | | |
| Pseudogymnoascus sp. | OBT77860.1 | 3044 | 4153 | 4716 | 5048 | | | | | | | | | | | | | |
| 05NY08 | | | | | | | | | | | | | | | | | | |
| Pseudogymnoascus sp. | OBT77860.1 | 3045 | 4154 | 4536 | 4928 | | | | | | | | | | | | | |
| 05NY08 | | | | | | | | | | | | | | | | | | |
| Pseudogymnoascus sp. | OBT51310.1 | 3046 | 4155 | 4619 | 4998 | | | | | | | | | | | | | |
| 24MN13 | | | | | | | | | | | | | | | | | | |
| Pseudogymnoascus sp. | OBT51310.1 | 3047 | 4156 | 4478 | 5009 | | | | | | | | | | | | | |
| 24MN13 | | | | | | | | | | | | | | | | | | |
| Pseudogymnoascus sp. | OBT51310.1 | 3048 | 4157 | 4477 | 5006 | | | | | | | | | | | | | |
| 24MN13 | | | | | | | | | | | | | | | | | | |
| Pseudogymnoascus sp. | OBT70084.1 | 3049 | 4158 | 4502 | 4978 | | | | | | | | | | | | | |
| 23342-1-I1 | | | | | | | | | | | | | | | | | | |
| Pseudogymnoascus sp. | OBT70084.1 | 3050 | 4159 | 4626 | | | | | | | | | | | | | | |
| 23342-1-I1 | | | | | | | | | | | | | | | | | | |
| Pseudogymnoascus sp. | KFY71191.1 | 3051 | 4160 | 4720 | 5050 | | | | | | | | | | | | | |
| VKM F-103 | | | | | | | | | | | | | | | | | | |
| Pseudogymnoascus sp. | KFY71191.1 | 3052 | 4161 | 4713 | 5045 | | | | | | | | | | | | | |
| VKM F-103 | | | | | | | | | | | | | | | | | | |
| Pseudogymnoascus sp. | KFY71191.1 | 3053 | 4162 | 4531 | 4927 | | | | | | | | | | | | | |
| VKM F-103 | | | | | | | | | | | | | | | | | | |
| Pseudogymnoascus sp. | KFX87612.1 | 3054 | 4163 | 4717 | 5043 | 5258 | | | | | | | | | | | | |
| VKM F-3557 | | | | | | | | | | | | | | | | | | |
| Pseudogymnoascus sp. | KFX87612.1 | 3055 | 4164 | 4711 | | | | | | | | | | | | | | |
| VKM F-3557 | | | | | | | | | | | | | | | | | | |
| Pseudogymnoascus sp. | KFX87612.1 | 3056 | 4165 | 4532 | 4924 | 5181 | | | | | | | | | | | | |
| VKM F-3557 | | | | | | | | | | | | | | | | | | |
| Pseudogymnoascus sp. | KFY06024.1 | 3057 | 4166 | 4510 | | | | | | | | | | | | | | |
| VKM F-3775 | | | | | | | | | | | | | | | | | | |
| Pseudogymnoascus sp. | KFY06024.1 | 3058 | 4167 | | | | | | | | | | | | | | | |
| VKM F-3775 | | | | | | | | | | | | | | | | | | |
| Pseudogymnoascus sp. | KFY11495.1 | 3059 | 4168 | 4507 | 4907 | | | | | | | | | | | | | |
| VKM F-4246 | | | | | | | | | | | | | | | | | | |
| Pseudogymnoascus sp. | KFY11495.1 | 3060 | 4169 | 4620 | | | | | | | | | | | | | | |
| VKM F-4246 | | | | | | | | | | | | | | | | | | |
| Pseudogymnoascus sp. | KFY29023.1 | 3061 | 4170 | | | | | | | | | | | | | | | |
| VKM F-4281 (FW-2241) | | | | | | | | | | | | | | | | | | |
| Pseudogymnoascus sp. | KFY29023.1 | 3062 | 4171 | | | | | | | | | | | | | | | |
| VKM F-4281 (FW-2241) | | | | | | | | | | | | | | | | | | |
| Pseudogymnoascus sp. | KFY29023.1 | 3063 | 4172 | | | | | | | | | | | | | | | |
| VKM F-4281 (FW-2241) | | | | | | | | | | | | | | | | | | |
| Pseudogymnoascus sp. | KFY29023.1 | 3064 | 4173 | | | | | | | | | | | | | | | |
| VKM F-4281 (FW-2241) | | | | | | | | | | | | | | | | | | |
| Pseudogymnoascus sp. | KFY34189.1 | 3065 | 4174 | 4508 | 4908 | | | | | | | | | | | | | |
| VKM F-4513 (FW-928) | | | | | | | | | | | | | | | | | | |
| Pseudogymnoascus sp. | KFY34189.1 | 3066 | 4175 | 4621 | | | | | | | | | | | | | | |
| VKM F-4513 (FW-928) | | | | | | | | | | | | | | | | | | |
| Pseudogymnoascus sp. | KFY38045.1 | 3067 | 4176 | 4500 | 4905 | 5239 | | | | | | | | | | | | |
| VKM F-4514 (FW-929) | | | | | | | | | | | | | | | | | | |
| Pseudogymnoascus sp. | KFY38045.1 | 3068 | 4177 | 4624 | | | | | | | | | | | | | | |
| VKM F-4514 (FW-929) | | | | | | | | | | | | | | | | | | |
| Pseudogymnoascus sp. | KFY38045.1 | 3069 | 4178 | 4501 | 4906 | 5240 | | | | | | | | | | | | |
| VKM F-4514 (FW-929) | | | | | | | | | | | | | | | | | | |
| Pseudogymnoascus sp. | KFY64466.1 | 3070 | 4179 | 4663 | 5017 | | | | | | | | | | | | | |
| VKM F-4515 (FW-2607) | | | | | | | | | | | | | | | | | | |
| Pseudogymnoascus sp. | KFY64466.1 | 3071 | 4180 | 4662 | | | | | | | | | | | | | | |
| VKM F-4515 (FW-2607) | | | | | | | | | | | | | | | | | | |
| Pseudogymnoascus sp. | KFY56828.1 | 3072 | 4181 | 4718 | 5044 | 5259 | | | | | | | | | | | | |
| VKM F-4516 (FW-969) | | | | | | | | | | | | | | | | | | |
| Pseudogymnoascus sp. | KFY56828.1 | 3073 | 4182 | 4712 | | | | | | | | | | | | | | |
| VKM F-4516 (FW-969) | | | | | | | | | | | | | | | | | | |
| Pseudogymnoascus sp. | KFY56828.1 | 3074 | 4183 | 4533 | 4925 | 5182 | | | | | | | | | | | | |
| VKM F-4516 (FW-969) | | | | | | | | | | | | | | | | | | |
| Pseudogymnoascus sp. | KFY93521.1 | 3075 | 4184 | 4506 | 5014 | | | | | | | | | | | | | |
| VKM F-4517 (FW-2822) | | | | | | | | | | | | | | | | | | |
| Pseudogymnoascus sp. | KFY93521.1 | 3076 | 4185 | 4625 | | | | | | | | | | | | | | |
| VKM F-4517 (FW-2822) | | | | | | | | | | | | | | | | | | |
| Pseudogymnoascus sp. | KFY96313.1 | 3077 | 4186 | 4879 | | | | | | | | | | | | | | |
| VKM F-4518 (FW-2643) | | | | | | | | | | | | | | | | | | |
| Pseudogymnoascus sp. | KFY96313.1 | 3078 | 4187 | 4878 | | | | | | | | | | | | | | |
| VKM F-4518 (FW-2643) | | | | | | | | | | | | | | | | | | |
| Pseudogymnoascus sp. | KFZ06200.1 | 3079 | 4188 | 4719 | 5049 | | | | | | | | | | | | | |
| VKM F-4519 (FW-2642) | | | | | | | | | | | | | | | | | | |
| Pseudogymnoascus sp. | KFZ06200.1 | 3080 | 4189 | 4715 | 5047 | | | | | | | | | | | | | |
| VKM F-4519 (FW-2642) | | | | | | | | | | | | | | | | | | |
| Pseudogymnoascus sp. | KFZ06200.1 | 3081 | 4190 | 4530 | 4926 | | | | | | | | | | | | | |
| VKM F-4519 (FW-2642) | | | | | | | | | | | | | | | | | | |
| Pseudogymnoascus sp. | KFZ18892.1 | 3082 | 4191 | 4646 | | | | | | | | | | | | | | |
| VKM F-4520 (FW-2644) | | | | | | | | | | | | | | | | | | |
| Pseudogymnoascus sp. | KFZ18892.1 | 3083 | 4192 | 4622 | | | | | | | | | | | | | | |
| VKM F-4520 (FW-2644) | | | | | | | | | | | | | | | | | | |
| Pseudogymnoascus sp. | OBT48713.1 | 3084 | 4193 | | | | | | | | | | | | | | | |
| WSF 3629 | | | | | | | | | | | | | | | | | | |
| Pseudogymnoascus sp. | OBT48713.1 | 3085 | 4194 | 4722 | 5157 | | | | | | | | | | | | | |
| WSF 3629 | | | | | | | | | | | | | | | | | | |
| Pseudogymnoascus sp. | OBT48713.1 | 3086 | 4195 | 4721 | | | | | | | | | | | | | | |
| WSF 3629 | | | | | | | | | | | | | | | | | | |
| Pseudogymnoascus sp. | OBT48713.1 | 3087 | 4196 | 4534 | 4929 | | | | | | | | | | | | | |
| WSF 3629 | | | | | | | | | | | | | | | | | | |
| Pseudogymnoascus verrucosus | OBT98717.1 | 3088 | 4197 | 4475 | 5007 | | | | | | | | | | | | | |
| Pseudogymnoascus verrucosus | OBT98717.1 | 3089 | 4198 | 4601 | 4997 | | | | | | | | | | | | | |
| Pseudogymnoascus verrucosus | OBT98717.1 | 3090 | 4199 | 4476 | 5008 | | | | | | | | | | | | | |
| Purpureocillium lilacinum | OAQ77955.1 | 3091 | 4200 | 4733 | 5058 | 5266 | | | | | | | | | | | | |
| Purpureocillium lilacinum | OAQ77955.1 | 3092 | 4201 | | | | | | | | | | | | | | | |
| Purpureocillium lilacinum | OAQ77955.1 | 3093 | 4202 | 4760 | | | | | | | | | | | | | | |
| Purpureocillium lilacinum | OAQ77955.1 | 3094 | 4203 | | | | | | | | | | | | | | | |
| Purpureocillium lilacinum | OAQ87765.1 | 3095 | 4204 | 4734 | 5059 | 5264 | | | | | | | | | | | | |
| Purpureocillium lilacinum | OAQ87765.1 | 3096 | 4205 | | | | | | | | | | | | | | | |
| Purpureocillium lilacinum | OAQ87765.1 | 3097 | 4206 | 4761 | | | | | | | | | | | | | | |
| Purpureocillium lilacinum | OAQ87765.1 | 3098 | 4207 | | | | | | | | | | | | | | | |
| Purpureocillium lilacinum | PWI71843.1 | 3099 | 4208 | 4735 | 5060 | 5265 | | | | | | | | | | | | |
| Purpureocillium lilacinum | PWI71843.1 | 3100 | 4209 | | | | | | | | | | | | | | | |
| Purpureocillium lilacinum | PWI71843.1 | 3101 | 4210 | 4762 | 5140 | | | | | | | | | | | | | |
| Purpureocillium lilacinum | PWI71843.1 | 3102 | 4211 | | | | | | | | | | | | | | | |
| Pyricularia grisea | TLD05564.1 | 3103 | 4212 | | | | | | | | | | | | | | | |
| Pyricularia grisea | TLD05564.1 | 3104 | 4213 | 4580 | 4985 | 5220 | | | | | | | | | | | | |
| Pyricularia grisea | TLD05564.1 | 3105 | 4214 | 4572 | 4957 | 5195 | | | | | | | | | | | | |
| Pyricularia oryzae | QBZ59762.1 | 3106 | 4215 | | | | | | | | | | | | | | | |
| Pyricularia oryzae | QBZ59762.1 | 3107 | 4216 | 4779 | 5090 | 5279 | | | | | | | | | | | | |
| Pyricularia oryzae | QBZ59762.1 | 3108 | 4217 | 4782 | 5087 | 5276 | | | | | | | | | | | | |
| Pyricularia oryzae 70-15 | EHA53132.1 | 3109 | 4218 | | | | | | | | | | | | | | | |
| Pyricularia oryzae 70-15 | EHA53132.1 | 3110 | 4219 | 4780 | 5091 | 5280 | | | | | | | | | | | | |
| Pyricularia oryzae 70-15 | EHA53132.1 | 3111 | 4220 | 4783 | 5088 | 5277 | | | | | | | | | | | | |
| Pyricularia oryzae P131 | ELQ63379.1 | 3112 | 4221 | | | | | | | | | | | | | | | |
| Pyricularia oryzae P131 | ELQ63379.1 | 3113 | 4222 | 4579 | 4983 | 5223 | | | | | | | | | | | | |
| Pyricularia oryzae P131 | ELQ63379.1 | 3114 | 4223 | 4578 | 4968 | 5231 | | | | | | | | | | | | |
| Pyricularia oryzae Y34 | ELQ41287.1 | 3115 | 4224 | | | | | | | | | | | | | | | |
| Pyricularia oryzae Y34 | ELQ41287.1 | 3116 | 4225 | 4781 | 5092 | 5281 | | | | | | | | | | | | |
| Pyricularia oryzae Y34 | ELQ41287.1 | 3117 | 4226 | 4784 | 5089 | 5278 | | | | | | | | | | | | |
| Pyricularia pennisetigena | TLS30223.1 | 3118 | 4227 | 4789 | 5094 | 5315 | | | | | | | | | | | | |
| Pyricularia pennisetigena | TLS30223.1 | 3119 | 4228 | 4788 | 5093 | 5314 | | | | | | | | | | | | |
| Pyricularia sp. CBS 133598 | TLD31639.1 | 3120 | 4229 | | | | | | | | | | | | | | | |
| Pyricularia sp. CBS 133598 | TLD31639.1 | 3121 | 4230 | 4581 | 4990 | 5226 | | | | | | | | | | | | |
| Pyricularia sp. CBS 133598 | TLD31639.1 | 3122 | 4231 | 4571 | 4967 | 5204 | | | | | | | | | | | | |
| Ramularia collo-cygni | CZT18030.1 | 3123 | 4232 | | | | | | | | | | | | | | | |
| Ramularia collo-cygni | CZT18030.1 | 3124 | 4233 | | | | | | | | | | | | | | | |
| Ramularia collo-cygni | CZT18030.1 | 3125 | 4234 | | | | | | | | | | | | | | | |
| Ramularia collo-cygni | CZT18030.1 | 3126 | 4235 | 4880 | | | | | | | | | | | | | | |
| Ramularia collo-cygni | CZT18030.1 | 3127 | 4236 | | | | | | | | | | | | | | | |
| Ramularia collo-cygni | CZT18030.1 | 3128 | 4237 | 4875 | | | | | | | | | | | | | | |
| Rhizodiscina lignyota | KAF2099123.1 | 3129 | 4238 | | | | | | | | | | | | | | | |
| Rhizodiscina lignyota | KAF2099123.1 | 3130 | 4239 | | | | | | | | | | | | | | | |
| Rhizodiscina lignyota | KAF2099123.1 | 3131 | 4240 | | | | | | | | | | | | | | | |
| Rutstroemia sp. NJR-2017a | PQE12560.1 | 3132 | 4241 | | | | | | | | | | | | | | | |
| BBW | | | | | | | | | | | | | | | | | | |
| Rutstroemia sp. NJR-2017a | PQE12560.1 | 3133 | 4242 | 4839 | 5133 | 5308 | 5425 | 5492 | | | | | | | | | | |
| BBW | | | | | | | | | | | | | | | | | | |
| Rutstroemia sp. NJR-2017a | PQE12560.1 | 3134 | 4243 | 4819 | 5132 | 5307 | 5424 | 5487 | 5545 | | | | | | | | | |
| BBW | | | | | | | | | | | | | | | | | | |
| Rutstroemia sp. NJR-2017a | PQE12560.1 | 3135 | 4244 | | | | | | | | | | | | | | | |
| BBW | | | | | | | | | | | | | | | | | | |
| Rutstroemia sp. NJR-2017a | PQE08130.1 | 3136 | 4245 | | | | | | | | | | | | | | | |
| BVV2 | | | | | | | | | | | | | | | | | | |
| Rutstroemia sp. NJR-2017a | PQE08130.1 | 3137 | 4246 | 4837 | 5130 | 5306 | 5422 | 5488 | 5546 | | | | | | | | | |
| BVV2 | | | | | | | | | | | | | | | | | | |
| Rutstroemia sp. NJR-2017a | PQE08130.1 | 3138 | 4247 | 4838 | 5131 | 5305 | 5423 | 5489 | 5547 | | | | | | | | | |
| BVV2 | | | | | | | | | | | | | | | | | | |
| Rutstroemia sp. NJR-2017a | PQE08130.1 | 3139 | 4248 | | | | | | | | | | | | | | | |
| BVV2 | | | | | | | | | | | | | | | | | | |
| Rutstroemia sp. NJR-2017a | PQE08130.1 | 3140 | 4249 | 4836 | | | | | | | | | | | | | | |
| BVV2 | | | | | | | | | | | | | | | | | | |
| Rutstroemia sp. NJR-2017a | PQE28263.1 | 3141 | 4250 | | | | | | | | | | | | | | | |
| WRK4 | | | | | | | | | | | | | | | | | | |
| Rutstroemia sp. NJR-2017a | PQE28263.1 | 3142 | 4251 | 4586 | 4994 | 5333 | 5438 | | | | | | | | | | | |
| WRK4 | | | | | | | | | | | | | | | | | | |
| Rutstroemia sp. NJR-2017a | PQE28263.1 | 3143 | 4252 | 4631 | 5013 | 5244 | 5390 | 5510 | | | | | | | | | | |
| WRK4 | | | | | | | | | | | | | | | | | | |
| Rutstroemia sp. NJR-2017a | PQE28263.1 | 3144 | 4253 | | | | | | | | | | | | | | | |
| WRK4 | | | | | | | | | | | | | | | | | | |
| Saccharata proteae CBS | KAF2084183.1 | 3145 | 4254 | 4641 | | | | | | | | | | | | | | |
| 121410 | | | | | | | | | | | | | | | | | | |
| Saccharata proteae CBS | KAF2084183.1 | 3146 | 4255 | | | | | | | | | | | | | | | |
| 121410 | | | | | | | | | | | | | | | | | | |
| Saccharata proteae CBS | KAF2084183.1 | 3147 | 4256 | 4647 | | | | | | | | | | | | | | |
| 121410 | | | | | | | | | | | | | | | | | | |
| Sclerotinia borealis F-4128 | ESZ97974.1 | 3148 | 4257 | | | | | | | | | | | | | | | |
| Sclerotinia borealis F-4128 | ESZ97974.1 | 3149 | 4258 | | | | | | | | | | | | | | | |
| Sclerotinia borealis F-4128 | ESZ97974.1 | 3150 | 4259 | 4835 | 5129 | 5322 | | | | | | | | | | | | |
| Sclerotinia borealis F-4128 | ESZ97974.1 | 3151 | 4260 | 4834 | 5125 | 5304 | 5433 | | | | | | | | | | | |
| Sclerotinia borealis F-4128 | ESZ97974.1 | 3152 | 4261 | | | | | | | | | | | | | | | |
| Sclerotinia borealis F-4128 | ESZ97974.1 | 3153 | 4262 | 4862 | | | | | | | | | | | | | | |
| Sclerotinia sclerotiorum | APA07130.1 | 3154 | 4263 | | | | | | | | | | | | | | | |
| 1980 UF-70 | | | | | | | | | | | | | | | | | | |
| Sclerotinia sclerotiorum | APA07130.1 | 3155 | 4264 | 4587 | 4973 | 5230 | 5439 | 5511 | 5567 | | | | | | | | | |
| 1980 UF-70 | | | | | | | | | | | | | | | | | | |
| Sclerotinia sclerotiorum | APA07130.1 | 3156 | 4265 | 4521 | 4914 | 5233 | 5384 | 5476 | 5566 | | | | | | | | | |
| 1980 UF-70 | | | | | | | | | | | | | | | | | | |
| Sclerotinia sclerotiorum | APA07130.1 | 3157 | 4266 | | | | | | | | | | | | | | | |
| 1980 UF-70 | | | | | | | | | | | | | | | | | | |
| Sclerotinia sclerotiorum | APA07130.1 | 3158 | 4267 | | | | | | | | | | | | | | | |
| 1980 UF-70 | | | | | | | | | | | | | | | | | | |
| Sclerotinia sclerotiorum | EDO01680.1 | 3159 | 4268 | | | | | | | | | | | | | | | |
| 1980 UF-70 | | | | | | | | | | | | | | | | | | |
| Sclerotinia sclerotiorum | EDO01680.1 | 3160 | 4269 | 4825 | 5118 | 5298 | 5418 | 5485 | 5555 | | | | | | | | | |
| 1980 UF-70 | | | | | | | | | | | | | | | | | | |
| Sclerotinia sclerotiorum | EDO01680.1 | 3161 | 4270 | 4826 | 5117 | 5301 | 5419 | 5486 | 5556 | | | | | | | | | |
| 1980 UF-70 | | | | | | | | | | | | | | | | | | |
| Sclerotinia sclerotiorum | EDO01680.1 | 3162 | 4271 | | | | | | | | | | | | | | | |
| 1980 UF-70 | | | | | | | | | | | | | | | | | | |
| Sclerotinia sclerotiorum | EDO01680.1 | 3163 | 4272 | | | | | | | | | | | | | | | |
| 1980 UF-70 | | | | | | | | | | | | | | | | | | |
| Sodiomyces alkalinus F11 | ROT37183.1 | 3164 | 4273 | 4683 | 5032 | 5253 | | | | | | | | | | | | |
| Sodiomyces alkalinus F11 | ROT37183.1 | 3165 | 4274 | 4682 | 5031 | 5252 | 5396 | | | | | | | | | | | |
| Sordaria macrospora | KAA8633182.1 | 3166 | 4275 | 4799 | 5101 | | | | | | | | | | | | | |
| Sordaria macrospora | KAA8633182.1 | 3167 | 4276 | 4803 | 5143 | | | | | | | | | | | | | |
| Sordaria macrospora | KAA8633182.1 | 3168 | 4277 | 4805 | 5145 | | | | | | | | | | | | | |
| Sordaria macrospora | KAA8633182.1 | 3169 | 4278 | 4797 | 5141 | | | | | | | | | | | | | |
| Sordaria macrospora | KAA8633182.1 | 3170 | 4279 | 4801 | 5103 | 5316 | | | | | | | | | | | | |
| Sordaria macrospora k-hell | CCC08615.1 | 3171 | 4280 | 4800 | 5102 | | | | | | | | | | | | | |
| Sordaria macrospora k-hell | CCC08615.1 | 3172 | 4281 | 4804 | 5144 | | | | | | | | | | | | | |
| Sordaria macrospora k-hell | CCC08615.1 | 3173 | 4282 | 4806 | 5146 | | | | | | | | | | | | | |
| Sordaria macrospora k-hell | CCC08615.1 | 3174 | 4283 | 4798 | 5142 | | | | | | | | | | | | | |
| Sordaria macrospora k-hell | CCC08615.1 | 3175 | 4284 | 4802 | 5104 | 5317 | | | | | | | | | | | | |
| Source: UniProtKB/TrEMBL; | CBF81183.1 | 3176 | 4285 | | | | | | | | | | | | | | | |
| Acc: Q7SI74 | | | | | | | | | | | | | | | | | | |
| Source: UniProtKB/TrEMBL; | CBF81183.1 | 3177 | 4286 | | | | | | | | | | | | | | | |
| Acc: Q7SI74 | | | | | | | | | | | | | | | | | | |
| Sporothrix brasiliensis 5110 | KIH94007.1 | 3178 | 4287 | 4568 | 4989 | | | | | | | | | | | | | |
| Sporothrix brasiliensis 5110 | KIH94007.1 | 3179 | 4288 | 4648 | | | | | | | | | | | | | | |
| Sporothrix brasiliensis 5110 | KIH94007.1 | 3180 | 4289 | | | | | | | | | | | | | | | |
| Sporothrix brasiliensis 5110 | KIH94007.1 | 3181 | 4290 | | | | | | | | | | | | | | | |
| Sporothrix insectorum | OAA66999.1 | 3182 | 4291 | | | | | | | | | | | | | | | |
| RCEF 264 | | | | | | | | | | | | | | | | | | |
| Sporothrix insectorum | OAA66999.1 | 3183 | 4292 | 4874 | | | | | | | | | | | | | | |
| RCEF 264 | | | | | | | | | | | | | | | | | | |
| Sporothrix insectorum | OAA66999.1 | 3184 | 4293 | | | | | | | | | | | | | | | |
| RCEF 264 | | | | | | | | | | | | | | | | | | |
| Sporothrix schenckii 1099- | KJR83391.1 | 3185 | 4294 | 4665 | | | | | | | | | | | | | | |
| 18 | | | | | | | | | | | | | | | | | | |
| Sporothrix schenckii 1099- | KJR83391.1 | 3186 | 4295 | | | | | | | | | | | | | | | |
| 18 | | | | | | | | | | | | | | | | | | |
| Sporothrix schenckii 1099- | KJR83391.1 | 3187 | 4296 | | | | | | | | | | | | | | | |
| 18 | | | | | | | | | | | | | | | | | | |
| Sporothrix schenckii ATCC | ERS98966.1 | 3188 | 4297 | 4609 | | | | | | | | | | | | | | |
| 58251 | | | | | | | | | | | | | | | | | | |
| Sporothrix schenckii ATCC | ERS98966.1 | 3189 | 4298 | | | | | | | | | | | | | | | |
| 58251 | | | | | | | | | | | | | | | | | | |
| Sporothrix schenckii ATCC | ERS98966.1 | 3190 | 4299 | | | | | | | | | | | | | | | |
| 58251 | | | | | | | | | | | | | | | | | | |
| Stachybotrys chartarum IBT | KEY69261.1 | 3191 | 4300 | 4612 | 5003 | | | | | | | | | | | | | |
| 7711 | | | | | | | | | | | | | | | | | | |
| Stachybotrys chartarum IBT | KEY69261.1 | 3192 | 4301 | 4538 | | | | | | | | | | | | | | |
| 7711 | | | | | | | | | | | | | | | | | | |
| Stachybotrys chartarum IBT | KEY69261.1 | 3193 | 4302 | | | | | | | | | | | | | | | |
| 7711 | | | | | | | | | | | | | | | | | | |
| Stachybotrys chartarum IBT | KFA76124.1 | 3194 | 4303 | 4613 | 5004 | | | | | | | | | | | | | |
| 40288 | | | | | | | | | | | | | | | | | | |
| Stachybotrys chartarum IBT | KFA76124.1 | 3195 | 4304 | 4539 | | | | | | | | | | | | | | |
| 40288 | | | | | | | | | | | | | | | | | | |
| Stachybotrys chartarum IBT | KFA76124.1 | 3196 | 4305 | | | | | | | | | | | | | | | |
| 40288 | | | | | | | | | | | | | | | | | | |
| Stachybotrys chartarum IBT | KFA46039.1 | 3197 | 4306 | 4755 | 5077 | | | | | | | | | | | | | |
| 40293 | | | | | | | | | | | | | | | | | | |
| Stachybotrys chartarum IBT | KFA46039.1 | 3198 | 4307 | 4756 | | | | | | | | | | | | | | |
| 40293 | | | | | | | | | | | | | | | | | | |
| Stachybotrys chartarum IBT | KFA46039.1 | 3199 | 4308 | | | | | | | | | | | | | | | |
| 40293 | | | | | | | | | | | | | | | | | | |
| Stachybotrys | KFA67343.1 | 3200 | 4309 | 4540 | 4992 | 5238 | | | | | | | | | | | | |
| chlorohalonata IBT 40285 | | | | | | | | | | | | | | | | | | |
| Stachybotrys | KFA67343.1 | 3201 | 4310 | 4537 | 4931 | | | | | | | | | | | | | |
| chlorohalonata IBT 40285 | | | | | | | | | | | | | | | | | | |
| Stachybotrys | KFA67343.1 | 3202 | 4311 | | | | | | | | | | | | | | | |
| chlorohalonata IBT 40285 | | | | | | | | | | | | | | | | | | |
| Thermothielavioides | SPQ18545.1 | 3203 | 4312 | | | | | | | | | | | | | | | |
| terrestris | | | | | | | | | | | | | | | | | | |
| Thermothielavioides | SPQ18545.1 | 3204 | 4313 | | | | | | | | | | | | | | | |
| terrestris | | | | | | | | | | | | | | | | | | |
| Thermothielavioides | SPQ18545.1 | 3205 | 4314 | | | | | | | | | | | | | | | |
| terrestris | | | | | | | | | | | | | | | | | | |
| Thermothielavioides | SPQ18545.1 | 3206 | 4315 | 4747 | 5065 | | | | | | | | | | | | | |
| terrestris | | | | | | | | | | | | | | | | | | |
| Thermothielavioides | SPQ18545.1 | 3207 | 4316 | 4748 | 5066 | | | | | | | | | | | | | |
| terrestris | | | | | | | | | | | | | | | | | | |
| Tothia fuscella | KAF2433310.1 | 3208 | 4317 | 4614 | 5029 | | | | | | | | | | | | | |
| Tothia fuscella | KAF2433310.1 | 3209 | 4318 | | | | | | | | | | | | | | | |
| Tothia fuscella | KAF2433310.1 | 3210 | 4319 | | | | | | | | | | | | | | | |
| Trichoderma arundinaceum | RFU76614.1 | 3211 | 4320 | | | | | | | | | | | | | | | |
| Trichoderma arundinaceum | RFU76614.1 | 3212 | 4321 | | | | | | | | | | | | | | | |
| Trichoderma arundinaceum | RFU76614.1 | 3213 | 4322 | 4845 | | | | | | | | | | | | | | |
| Trichoderma asperellum | GFP57911.1 | 3214 | 4323 | 4498 | 4999 | 5246 | | | | | | | | | | | | |
| Trichoderma asperellum | PTB39383.1 | 3215 | 4324 | 4499 | 5000 | 5247 | | | | | | | | | | | | |
| CBS 433.97 | | | | | | | | | | | | | | | | | | |
| Trichoderma atroviride IMI | EHK50485.1 | 3216 | 4325 | 4632 | 5001 | 5249 | | | | | | | | | | | | |
| 206040 | | | | | | | | | | | | | | | | | | |
| Trichoderma citrinoviride | PTB66885.1 | 3217 | 4326 | | | | | | | | | | | | | | | |
| Trichoderma citrinoviride | PTB66885.1 | 3218 | 4327 | 4634 | | | | | | | | | | | | | | |
| Trichoderma citrinoviride | PTB66885.1 | 3219 | 4328 | | | | | | | | | | | | | | | |
| Trichoderma citrinoviride | PTB66885.1 | 3220 | 4329 | | | | | | | | | | | | | | | |
| Trichoderma gamsii | PNP46806.1 | 3221 | 4330 | 4852 | 5136 | 5310 | | | | | | | | | | | | |
| Trichoderma gamsii | PON27232.1 | 3222 | 4331 | 4633 | 5002 | 5248 | | | | | | | | | | | | |
| Trichoderma guizhouense | OPB47026.1 | 3223 | 4332 | | | | | | | | | | | | | | | |
| Trichoderma guizhouense | OPB47026.1 | 3224 | 4333 | | | | | | | | | | | | | | | |
| Trichoderma guizhouense | OPB47026.1 | 3225 | 4334 | | | | | | | | | | | | | | | |
| Trichoderma guizhouense | OPB47026.1 | 3226 | 4335 | | | | | | | | | | | | | | | |
| Trichoderma guizhouense | OPB47026.1 | 3227 | 4336 | 4669 | | | | | | | | | | | | | | |
| Trichoderma harzianum | KKP01241.1 | 3228 | 4337 | | | | | | | | | | | | | | | |
| Trichoderma harzianum | KKP01241.1 | 3229 | 4338 | | | | | | | | | | | | | | | |
| Trichoderma harzianum | KKP01241.1 | 3230 | 4339 | 4844 | | | | | | | | | | | | | | |
| Trichoderma harzianum | PKK54570.1 | 3231 | 4340 | | | | | | | | | | | | | | | |
| Trichoderma harzianum | PKK54570.1 | 3232 | 4341 | | | | | | | | | | | | | | | |
| Trichoderma harzianum | PKK54570.1 | 3233 | 4342 | | | | | | | | | | | | | | | |
| Trichoderma harzianum | PKK54570.1 | 3234 | 4343 | | | | | | | | | | | | | | | |
| Trichoderma harzianum | PNP51338.1 | 3235 | 4344 | | | | | | | | | | | | | | | |
| Trichoderma harzianum | PNP51338.1 | 3236 | 4345 | | | | | | | | | | | | | | | |
| Trichoderma harzianum | PNP51338.1 | 3237 | 4346 | 4670 | 5020 | | | | | | | | | | | | | |
| Trichoderma harzianum | PNP51338.1 | 3238 | 4347 | | | | | | | | | | | | | | | |
| Trichoderma harzianum | PTB53931.1 | 3239 | 4348 | | | | | | | | | | | | | | | |
| CBS 226.95 | | | | | | | | | | | | | | | | | | |
| Trichoderma harzianum | PTB53931.1 | 3240 | 4349 | | | | | | | | | | | | | | | |
| CBS 226.95 | | | | | | | | | | | | | | | | | | |
| Trichoderma harzianum | PTB53931.1 | 3241 | 4350 | | | | | | | | | | | | | | | |
| CBS 226.95 | | | | | | | | | | | | | | | | | | |
| Trichoderma lentiforme | KAF3076392.1 | 3242 | 4351 | | | | | | | | | | | | | | | |
| Trichoderma lentiforme | KAF3076392.1 | 3243 | 4352 | | | | | | | | | | | | | | | |
| Trichoderma lentiforme | KAF3076392.1 | 3244 | 4353 | | | | | | | | | | | | | | | |
| Trichoderma lentiforme | KAF3076392.1 | 3245 | 4354 | | | | | | | | | | | | | | | |
| Trichoderma longibrachiatum ATCC | PTB76312.1 | 3246 | 4355 | 4846 | 5135 | | | | | | | | | | | | | |
| 18648 | | | | | | | | | | | | | | | | | | |
| Trichoderma longibrachiatum ATCC | PTB76312.1 | 3247 | 4356 | | | | | | | | | | | | | | | |
| 18648 | | | | | | | | | | | | | | | | | | |
| Trichoderma longibrachiatum ATCC | PTB76312.1 | 3248 | 4357 | | | | | | | | | | | | | | | |
| 18648 | | | | | | | | | | | | | | | | | | |
| Trichoderma parareesei | OTA00537.1 | 3249 | 4358 | | | | | | | | | | | | | | | |
| Trichoderma parareesei | OTA00537.1 | 3250 | 4359 | 4635 | | | | | | | | | | | | | | |
| Trichoderma parareesei | OTA00537.1 | 3251 | 4360 | | | | | | | | | | | | | | | |
| Trichoderma reesei QM6a | EGR51418.1 | 3252 | 4361 | | | | | | | | | | | | | | | |
| Trichoderma reesei QM6a | EGR51418.1 | 3253 | 4362 | 4636 | | | | | | | | | | | | | | |
| Trichoderma reesei QM6a | EGR51418.1 | 3254 | 4363 | | | | | | | | | | | | | | | |
| Trichoderma reesei RUT C- | ETS04638.1 | 3255 | 4364 | | | | | | | | | | | | | | | |
| 30 | | | | | | | | | | | | | | | | | | |
| Trichoderma reesei RUT C- | ETS04638.1 | 3256 | 4365 | 4847 | | | | | | | | | | | | | | |
| 30 | | | | | | | | | | | | | | | | | | |
| Trichoderma reesei RUT C- | ETS04638.1 | 3257 | 4366 | | | | | | | | | | | | | | | |
| 30 | | | | | | | | | | | | | | | | | | |
| Trichoderma virens Gv29-8 | EHK18149.1 | 3258 | 4367 | | | | | | | | | | | | | | | |
| Trichoderma virens Gv29-8 | EHK18149.1 | 3259 | 4368 | | | | | | | | | | | | | | | |
| Trichoderma virens Gv29-8 | EHK18149.1 | 3260 | 4369 | 4848 | | | | | | | | | | | | | | |
| Trichoderma virens Gv29-8 | EHK18149.1 | 3261 | 4370 | | | | | | | | | | | | | | | |
| Ustilaginoidea virens | GAO19951.1 | 3262 | 4371 | 4817 | | | | | | | | | | | | | | |
| Ustilaginoidea virens | GAO19951.1 | 3263 | 4372 | 4816 | | | | | | | | | | | | | | |
| Ustilaginoidea virens | GAO19951.1 | 3264 | 4373 | | | | | | | | | | | | | | | |
| Ustilaginoidea virens | GAO19951.1 | 3265 | 4374 | | | | | | | | | | | | | | | |
| Ustilaginoidea virens | GAO19951.1 | 3266 | 4375 | | | | | | | | | | | | | | | |
| Ustilaginoidea virens | KDB15855.1 | 3267 | 4376 | 4671 | | | | | | | | | | | | | | |
| Ustilaginoidea virens | KDB15855.1 | 3268 | 4377 | 4679 | | | | | | | | | | | | | | |
| Ustilaginoidea virens | KDB15855.1 | 3269 | 4378 | | | | | | | | | | | | | | | |
| Ustilaginoidea virens | KDB15855.1 | 3270 | 4379 | | | | | | | | | | | | | | | |
| Ustilaginoidea virens | KDB15855.1 | 3271 | 4380 | | | | | | | | | | | | | | | |
| Valsa malicola | ROV90930.1 | 3272 | 4381 | | | | | | | | | | | | | | | |
| Valsa malicola | ROV90930.1 | 3273 | 4382 | 4812 | 5108 | 5318 | | | | | | | | | | | | |
| Valsa malicola | ROV90930.1 | 3274 | 4383 | | | | | | | | | | | | | | | |
| Valsa mali | KUI66006.1 | 3275 | 4384 | | | | | | | | | | | | | | | |
| Valsa mali | KUI66006.1 | 3276 | 4385 | 4573 | 4987 | 5222 | 5375 | | | | | | | | | | | |
| Valsa mali | KUI66006.1 | 3277 | 4386 | 4564 | 4959 | 5199 | 5361 | | | | | | | | | | | |
| Valsa mali var. pyri | KUI57582.1 | 3278 | 4387 | | | | | | | | | | | | | | | |
| Valsa mali var. pyri | KUI57582.1 | 3279 | 4388 | 4814 | 5109 | 5289 | 5407 | | | | | | | | | | | |
| Valsa mali var. pyri | KUI57582.1 | 3280 | 4389 | 4813 | 5110 | 5288 | 5406 | | | | | | | | | | | |
| Valsa sordida | ROV97266.1 | 3281 | 4390 | | | | | | | | | | | | | | | |
| Valsa sordida | ROV97266.1 | 3282 | 4391 | 4811 | 5107 | 5287 | 5408 | | | | | | | | | | | |
| Valsa sordida | ROV97266.1 | 3283 | 4392 | 4810 | 5106 | 5286 | 5409 | | | | | | | | | | | |
| Venustampulla echinocandica | RDL36895.1 | 3284 | 4393 | 4575 | 5030 | | | | | | | | | | | | | |
| Venustampulla echinocandica | RDL36895.1 | 3285 | 4394 | 4584 | 4970 | | | | | | | | | | | | | |
| Venustampulla echinocandica | RDL36895.1 | 3286 | 4395 | 4583 | 4969 | 5251 | 5391 | 5509 | | | | | | | | | | |
| Verticillium alfalfae | EEY18941.1 | 3287 | 4396 | 4881 | | | | | | | | | | | | | | |
| VaMs.102 | | | | | | | | | | | | | | | | | | |
| Verticillium alfalfae | EEY18941.1 | 3288 | 4397 | 4882 | | | | | | | | | | | | | | |
| VaMs.102 | | | | | | | | | | | | | | | | | | |
| Verticillium dahliae | PNH26582.1 | 3289 | 4398 | 4688 | | | | | | | | | | | | | | |
| Verticillium dahliae | PNH26582.1 | 3290 | 4399 | | | | | | | | | | | | | | | |
| Verticillium dahliae | PNH26582.1 | 3291 | 4400 | 4689 | | | | | | | | | | | | | | |
| Verticillium dahliae | PNH44414.1 | 3292 | 4401 | | | | | | | | | | | | | | | |
| Verticillium dahliae | PNH55381.1 | 3293 | 4402 | 4690 | | | | | | | | | | | | | | |
| Verticillium dahliae | PNH55381.1 | 3294 | 4403 | | | | | | | | | | | | | | | |
| Verticillium dahliae | PNH69252.1 | 3295 | 4404 | 4691 | | | | | | | | | | | | | | |
| Verticillium dahliae | PNH69252.1 | 3296 | 4405 | | | | | | | | | | | | | | | |
| Verticillium dahliae | PNH74357.1 | 3297 | 4406 | 4692 | | | | | | | | | | | | | | |
| Verticillium dahliae | PNH74357.1 | 3298 | 4407 | | | | | | | | | | | | | | | |
| Verticillium dahliae | RBQ66058.1 | 3299 | 4408 | | | | | | | | | | | | | | | |
| Verticillium dahliae | RBQ66058.1 | 3300 | 4409 | | | | | | | | | | | | | | | |
| Verticillium dahliae | RXG44844.1 | 3301 | 4410 | 4496 | | | | | | | | | | | | | | |
| Verticillium dahliae | RXG44844.1 | 3302 | 4411 | | | | | | | | | | | | | | | |
| Verticillium dahliae VDG1 | KAF3361077.1 | 3303 | 4412 | | | | | | | | | | | | | | | |
| Verticillium dahliae VDG1 | KAF3361077.1 | 3304 | 4413 | | | | | | | | | | | | | | | |
| Verticillium dahliae VDG2 | KAF3351572.1 | 3305 | 4414 | | | | | | | | | | | | | | | |
| Verticillium dahliae VDG2 | KAF3351572.1 | 3306 | 4415 | | | | | | | | | | | | | | | |
| Verticillium dahliae | EGY20680.1 | 3307 | 4416 | 4497 | | | | | | | | | | | | | | |
| VdLs.17 | | | | | | | | | | | | | | | | | | |
| Verticillium dahliae | EGY20680.1 | 3308 | 4417 | | | | | | | | | | | | | | | |
| VdLs.17 | | | | | | | | | | | | | | | | | | |
| Verticillium longisporum | CRK24293.1 | 3309 | 4418 | | | | | | | | | | | | | | | |
| Verticillium longisporum | CRK31202.1 | 3310 | 4419 | | | | | | | | | | | | | | | |
| Verticillium longisporum | CRK31202.1 | 3311 | 4420 | 4495 | | | | | | | | | | | | | | |
| Verticillium longisporum | CRK31202.1 | 3312 | 4421 | | | | | | | | | | | | | | | |
| Verticillium longisporum | CRK39339.1 | 3313 | 4422 | 4687 | | | | | | | | | | | | | | |
| Verticillium longisporum | CRK39339.1 | 3314 | 4423 | 4709 | | | | | | | | | | | | | | |
| Verticillium longisporum | CRK39339.1 | 3315 | 4424 | | | | | | | | | | | | | | | |
| Verticillium nonalfalfae | RNJ59748.1 | 3316 | 4425 | | | | | | | | | | | | | | | |
| Verticillium nonalfalfae | RNJ59748.1 | 3317 | 4426 | | | | | | | | | | | | | | | |
| Westerdykella ornata | KAF2280835.1 | 3318 | 4427 | 4726 | | | | | | | | | | | | | | |
| Westerdykella ornata | KAF2280835.1 | 3319 | 4428 | 4727 | | | | | | | | | | | | | | |
| Westerdykella ornata | KAF2280835.1 | 3320 | 4429 | | | | | | | | | | | | | | | |
| Westerdykella ornata | KAF2280835.1 | 3321 | 4430 | 4725 | | | | | | | | | | | | | | |
| Westerdykella ornata | KAF2280835.1 | 3322 | 4431 | | | | | | | | | | | | | | | |
| Xylona heveae TC161 | KZF24661.1 | 3323 | 4432 | 4604 | | | | | | | | | | | | | | |
| Xylona heveae TC161 | KZF24661.1 | 3324 | 4433 | | | | | | | | | | | | | | | |
| Xylona heveae TC161 | KZF24661.1 | 3325 | 4434 | | | | | | | | | | | | | | | |
| Zasmidium cellare ATCC | KAF2168898.1 | 3326 | 4435 | | | | | | | | | | | | | | | |
| 36951 | | | | | | | | | | | | | | | | | | |
| Zasmidium cellare ATCC | KAF2168898.1 | 3327 | 4436 | | | | | | | | | | | | | | | |
| 36951 | | | | | | | | | | | | | | | | | | |
| Zasmidium cellare ATCC | KAF2168898.1 | 3328 | 4437 | | | | | | | | | | | | | | | |
| 36951 | | | | | | | | | | | | | | | | | | |
| Zasmidium cellare ATCC | KAF2168898.1 | 3329 | 4438 | 4729 | 5051 | | | | | | | | | | | | | |
| 36951 | | | | | | | | | | | | | | | | | | |
| Zasmidium cellare ATCC | KAF2168898.1 | 3330 | 4439 | | | | | | | | | | | | | | | |
| 36951 | | | | | | | | | | | | | | | | | | |
| Zasmidium cellare ATCC | KAF2168898.1 | 3331 | 4440 | | | | | | | | | | | | | | | |
| 36951 | | | | | | | | | | | | | | | | | | |
| Zymoseptoria brevis | KJX95557.1 | 3332 | 4441 | 4841 | | | | | | | | | | | | | | |
| Zymoseptoria brevis | KJX95557.1 | 3333 | 4442 | 4842 | | | | | | | | | | | | | | |
| Zymoseptoria brevis | KJX95557.1 | 3334 | 4443 | 4840 | 5134 | 5309 | | | | | | | | | | | | |
| Zymoseptoria brevis | KJX95557.1 | 3335 | 4444 | 4843 | | | | | | | | | | | | | | |
| Zymoseptoria brevis | KJX95557.1 | 3336 | 4445 | | | | | | | | | | | | | | | |
| Zymoseptoria brevis | KJX95557.1 | 3337 | 4446 | | | | | | | | | | | | | | | |
| Zymoseptoria tritici IPO323 | EGP86263.1 | 3338 | 4447 | 4642 | | | | | | | | | | | | | | |
| Zymoseptoria tritici IPO323 | EGP86263.1 | 3339 | 4448 | 4589 | | | | | | | | | | | | | | |
| Zymoseptoria tritici IPO323 | EGP86263.1 | 3340 | 4449 | 4890 | 5162 | 5334 | | | | | | | | | | | | |
| Zymoseptoria tritici IPO323 | EGP86263.1 | 3341 | 4450 | 4590 | | | | | | | | | | | | | | |
| Zymoseptoria tritici IPO323 | EGP86263.1 | 3342 | 4451 | | | | | | | | | | | | | | | |
| Zymoseptoria tritici IPO323 | EGP86263.1 | 3343 | 4452 | | | | | | | | | | | | | | | |
| Zymoseptoria tritici | SMY25842.1 | 3344 | 4453 | 4643 | | | | | | | | | | | | | | |
| ST99CH_1A5 | | | | | | | | | | | | | | | | | | |
| Zymoseptoria tritici | SMY25842.1 | 3345 | 4454 | 4591 | | | | | | | | | | | | | | |
| ST99CH_1A5 | | | | | | | | | | | | | | | | | | |
| Zymoseptoria tritici | SMY25842.1 | 3346 | 4455 | 4891 | 5163 | 5335 | | | | | | | | | | | | |
| ST99CH_1A5 | | | | | | | | | | | | | | | | | | |
| Zymoseptoria tritici | SMY25842.1 | 3347 | 4456 | 4592 | | | | | | | | | | | | | | |
| ST99CH_1A5 | | | | | | | | | | | | | | | | | | |
| Zymoseptoria tritici | SMY25842.1 | 3348 | 4457 | | | | | | | | | | | | | | | |
| ST99CH_1A5 | | | | | | | | | | | | | | | | | | |
| Zymoseptoria tritici | SMY25842.1 | 3349 | 4458 | | | | | | | | | | | | | | | |
| ST99CH_1A5 | | | | | | | | | | | | | | | | | | |
| Zymoseptoria tritici | SMR55018.1 | 3350 | 4459 | 4644 | | | | | | | | | | | | | | |
| ST99CH_1E4 | | | | | | | | | | | | | | | | | | |
| Zymoseptoria tritici | SMR55018.1 | 3351 | 4460 | 4595 | | | | | | | | | | | | | | |
| ST99CH_1E4 | | | | | | | | | | | | | | | | | | |
| Zymoseptoria tritici | SMR55018.1 | 3352 | 4461 | 4892 | 5164 | 5336 | | | | | | | | | | | | |
| ST99CH_1E4 | | | | | | | | | | | | | | | | | | |
| Zymoseptoria tritici | SMR55018.1 | 3353 | 4462 | 4596 | | | | | | | | | | | | | | |
| ST99CH_1E4 | | | | | | | | | | | | | | | | | | |
| Zymoseptoria tritici | SMR55018.1 | 3354 | 4463 | | | | | | | | | | | | | | | |
| ST99CH_1E4 | | | | | | | | | | | | | | | | | | |
| Zymoseptoria tritici | SMR55018.1 | 3355 | 4464 | | | | | | | | | | | | | | | |
| ST99CH_1E4 | | | | | | | | | | | | | | | | | | |
| Zymoseptoria tritici | SMQ52196.1 | 3356 | 4465 | 4645 | | | | | | | | | | | | | | |
| ST99CH_3D7 | | | | | | | | | | | | | | | | | | |
| Zymoseptoria tritici | SMQ52196.1 | 3357 | 4466 | 4593 | | | | | | | | | | | | | | |
| ST99CH_3D7 | | | | | | | | | | | | | | | | | | |
| Zymoseptoria tritici | SMQ52196.1 | 3358 | 4467 | 4893 | 5165 | 5337 | | | | | | | | | | | | |
| ST99CH_3D7 | | | | | | | | | | | | | | | | | | |
| Zymoseptoria tritici | SMQ52196.1 | 3359 | 4468 | 4594 | | | | | | | | | | | | | | |
| ST99CH_3D7 | | | | | | | | | | | | | | | | | | |
| Zymoseptoria tritici | SMQ52196.1 | 3360 | 4469 | | | | | | | | | | | | | | | |
| ST99CH_3D7 | | | | | | | | | | | | | | | | | | |
| Zymoseptoria tritici | SMQ52196.1 | 3361 | 4470 | | | | | | | | | | | | | | | |
| ST99CH_3D7 | | | | | | | | | | | | | | | | | | |

### Example 13

[0126] This example describes expression of at least one conidial germination inhibiting (CGI) factor in plant cells. More specifically, this example illustrates bacterially mediated transfection of various DNA constructs encoding at least one CGI factor peptide into a plant, resulting in transient expression of the CGI factor peptide.

[0127] An expression cassette (construct “HD6”) was designed to include a Zea mays ubiquitin 10 promoter operably linked to and driving expression of coding sequence encoding a secretion signal peptide (“GRP”) fused to DNA encoding the synthetic CGI factor “HH38” (a dimer of the Saccharomyces cerevisiae alpha pheromone with a GGGG linker, with the sequence WHWLQLKPGQPMYGGGGSWHWLQLKPGQPMY, SEQ ID NO: 2189), operably linked to a NOS terminator. Variants of this expression cassette included additional elements. See Table 7. Construct “HD7” added a FLAG tag for immunogenic detection and the fluorophore mCherry. Construct “HD8” also included a FLAG tag and mCherry fluorophore, and further included the SV40 nuclear localization signal (“NLS”) in place of the GRP secretion signal peptide. Finally, construct “HD9” was a control plasmid similar to HD8 but lacking the DNA encoding the CGI factor HH38. See Table 7 for description of the plasmids.

TABLE 7

| | Plasmid ID | | | |
|---|---|---|---|---|
| | pHD6 | pHD7 | pHD8 | pHD9 |
| | Construct | | | |
| | HD6 | HD7 | HD8 | HD9 |
| | Construct SEQ ID NO: | | | |
| | 5732 | 5733 | 5734 | 5735 |
| Construct design | UBQ::GRP- | UBQ::GRP- | UBQ::NLS- | UBQ::NLS- |
| | HH38::NOS | HH38-FLAG- | HH38-FLAG- | FLAG- |
| | | mCherry | mCherry | mCherry-P2A- |
| | | | | HH38 |
| Ubiquitin 10 promoter | 13-1339 | 13-1339 | 13-1339 | 13-1339 |
| GRP secretion signal | 1367-1432 | 1367-1432 | — | — |
| SV40 NLS | — | — | 1367-1402 | 1367-1402 |
| HH38 | 1433-1525 | 1433-1525 | 1403-1495 | 2198-2290 |
| FLAG tag | — | 1526-1549 | 1496-1519 | 1403-1426 |
| mCherry | — | 1550-2257 | 1520-2227 | 1427-2131 |
| GSG linker | | | | 2132-2140 |
| P2A cleavage sequence | | | | 2141-2197 |
| Nos terminator | 1458-1710 | 2289-2538 | 2292-2544 | 2319-2571 |
| Total length (base pairs) | 1816 | 2548 | 2554 | 2581 |

[0128] Individual expression cassettes were inserted into a Ti plasmid pMP90, flanked by T-DNA right and left borders, to provide plasmids pHD6-pHD9, respectively. Competent Agrobacterium tumefaciens strain GV3101 was used for transient transformation of the resulting plasmids via leaf infiltration into tobacco, Nicotiana benthamiana. Leaf tissue from the transiently transformed plants was sampled 2 days after infiltration for protein extraction and analysis using Coomassie Brilliant Blue staining and Western blots using mouse or rabbit anti-FLAG antibodies. Coomassie staining indicated the presence of a peptide having the correct molecular weight in total protein extracted from leaves infiltrated with the HD6, HD7, HD8, and HD9 constructs, indicating possible protein expression in these leaves. To further characterize the protein band, Western blot analysis was performed with anti-FLAG antibodies, and positive bands of the correct size were observed as expected for total protein extracted from leaves infiltrated with the HD7, HD8, and HD9 constructs and also for protein extracted from apoplastic fluid from leaves infiltrated with the HD7 construct, which includes a GRP secretion signal, or with the HD9 construct, which includes a P2A cleavage sequence.

[0129] Leaf tissue from the transiently transformed plants was also sampled 2 days after infiltration for fluorescence imaging using an Olympus epifluorescence microscope (RFP/Cy3 channel) at 10× magnification. No fluorescence in the selected channel was observed in tissue from leaves infiltrated with the negative control construct, HD6, which lacks mCherry. Diffuse mCherry fluorescence was observed in tissue from leaves infiltrated with the HD7 construct, suggest that the mCherry-labelled HH38 CGI peptide was secreted. A punctate fluorescent signal indicating nuclear localization of mCherry was observed in tissue from leaves infiltrated with the HD9 construct, which included a nuclear localization signal fused to the mCherry reporter.

### Example 14

[0130] This example illustrates a method for controlling a fungal pathogen comprising applying to a locus that contains or will be exposed to a fungal pathogen, a composition including at least one conidial germination inhibiting (CGI) factor, a CGI factor precursor, a CGI factor fragment, or a CGI factor motif derived from a least one of the fungal pathogen, a fungus in the same genus as the fungal pathogen, a fungus in a different genus than the fungal pathogen, or a mixture thereof. This example further illustrates providing an organism with resistance to a fungal pathogen of the organism, including the step of contacting the organism with an antifungal composition that includes an effective amount of at least one CGI factor, optionally wherein the amino acid sequence of the CGI factor is not that of an alpha pheromone natively expressed by the fungal pathogen, or wherein the nucleotide sequence encoding the CGI factor does not occur in the genome of the fungal pathogen. More specifically, this example demonstrates that topical application of an antifungal CGI factor-containing composition onto leaves of a plant (Nicotiana benthamiana) effectively reduces or prevents symptoms of infection by a fungal pathogen (Botrytis cinerea). In this example, the antifungal CGI factor-containing composition included the synthetic CGI factor “HH38”, with the amino acid sequence WHWLQLKPGQPMYGGGGSWHWLQLKPGQPMY (SEQ ID NO:2189), which is a homodimer of the native Saccharomyces cerevisiae alpha pheromone WHWLQLKPGQPMY (SEQ ID NO: 2184) with an added GGGG linker, that is to say, the synthetic CGI factor “HH38” has an amino acid sequence that is different from the alpha pheromone WCGRPGQPC (SEQ ID NO: 2183) that is natively expressed by the fungal pathogen (Botrytis cinerea).

[0131] In one experiment, leaves of similar age were cut from healthy Nicotiana benthamiana plants and the petioles set into plates containing water agar. Leaves were visually divided into quadrants. Into each quadrant was placed one 10-microliter droplet of a Botrytis cinerea conidial suspension (3.2E+05 conidia/mL in 10% white grape juice in water), followed by 100 microliters of a given treatment solution (or no addition as a control); three leaves were used per treatment condition: 5 mM 2-(N-morpholino) ethanesulfonic acid (MES) buffer; 275 micromolar CGI factor “HH38” (SEQ ID NO: 2189) in 5 mM MES buffer; 275 micromolar Fenpiclonil (4-(2,3-dichlorophenyl)-1H-pyrrole-3-carbonitrile, a phenylpyrrole fungicide) in 50% ethanol; and 50% ethanol. The plates were covered and placed in a humidified secondary container and incubated in a growth chamber under a 14-hour light (20 degrees C.): 10-hour dark (18 degrees C.) cycle. After 11 days, fungal lesions on leaves were photographed and measured manually with a ruler. Leaves were then destained in 70% ethanol for 48 hours with a change of ethanol at 24 hours, rehydrated in water for at least 1 hour, photographed, and the area of the fungal lesions quantified using ImageJ software (see imagej[dot]nih[dot]gov/ij/). Under these experimental conditions, Fenpiclonil was observed to be phytotoxic, with tissue necrosis observed at the treatment site, and therefore this treatment and the corresponding ethanol control were discarded from the analysis. Results for the control, MES, and CGI factor peptide HH38 are provided in Table 8 and FIG. 7. Most (10/12) leaf quadrants inoculated with 10 microliters Botrytis cinerea inoculum developed small (about one-third cm diameter) fungal lesions at the inoculation site; the small volume of liquid applied to these quadrants presumably limited the lesion size but indicated that this tissue is generally susceptible to infection by B. cineria. The leaf quadrants inoculated with B. cinerea and treated with 100 microliters of treatment solution (MES buffer or HH38 in MES buffer) had comparatively larger areas wetted with liquid. All of the leaf quadrants treated with 5 mM MES buffer developed large (average 1.72 cm width) fungal lesions characterized by grey-black fungal growth. In contrast, only 1 out of 12 leaf quadrants treated with 375 micromolar CGI factor HH38 developed any measurable fungal lesion. These data indicate that topical application of the CGI factor HH38 (SEQ ID NO:2189) effectively inhibited Botrytis cinerea growth on Nicotiana benthamiana leaves. These results demonstrate that an antifungal composition that includes a CGI factor effectively inhibits growth of a fungal pathogen on or within an organism, wherein the amino acid sequence of the CGI factor is not that of an alpha pheromone natively expressed by the fungal pathogen, or wherein the nucleotide sequence encoding the CGI factor does not occur in the genome of the fungal pathogen.

TABLE 8

| | | | | | | | Treatment |
|---|---|---|---|---|---|---|---|
| | | Lesion 1 | Lesion 2 | Lesion 3 | Lesion 4 | Average | Average |
| Treatment | Replicate | (cm) | (cm) | (cm) | (cm) | (cm) | (cm) |
| Untreated | 1 | 0.5 | 0.5 | 0.3 | 0 | 0.32 | 0.36 |
| | 2 | 0.5 | 0.5 | 0.2 | 0.3 | 0.38 | |
| | 3 | 1 | 0.3 | 0.2 | 0 | 0.38 | |
| MES | 1 | 1 | 1.5 | 2.5 | 0.9 | 1.5 | 1.72 |
| | 2 | 1.5 | 3 | 2 | 1.6 | 2.0 | |
| | 3 | 1.6 | 2 | 1 | 2 | 1.6 | |
| HH38 | 1 | 0 | 0 | 0 | 0 | 0 | 0.042 |
| | 2 | 0 | 0 | 0 | 0 | 0 | |
| | 3 | 0 | 0.5 | 0 | 0 | 0.12 | |

| | | | | | | Replicate | Treatment |
|---|---|---|---|---|---|---|---|
| | | Lesion 1 | Lesion 2 | Lesion 3 | Lesion 4 | Averages | Average |
| Treatment | Replicate | (pixels) | (pixels) | (pixels) | (pixels) | (pixels) | (pixels) |
| Untreated | 1 | 1621 | 2258 | 284 | 0 | 1041 | 1651 |
| | 2 | 2226 | 1545 | 294 | 849 | 1228 | |
| | 3 | 7337 | 2093 | 1310 | 0 | 2685 | |
| 5 mM MES | 1 | 10310 | 19331 | 71887 | 14037 | 28891 | 71556 |
| | 2 | 120666 | 130012 | 74938 | 84692 | 102577 | |
| | 3 | 56849 | 124384 | 46621 | 104946 | 83200 | |
| HH38 | 1 | 0 | 0 | 0 | 0 | 0.00 | 157 |
| | 2 | 0 | 0 | 0 | 0 | 0.00 | |
| | 3 | 0 | 1889 | 0 | 0 | 472 | |

[0132] A second experiment to test the ability of the CGI factor “HH38” (SEQ ID NO:2189) to reduce or prevent symptoms of infection by Botrytis cinerea in Nicotiana benthamiana was carried out using similar methodology, except that the B. cinerea inoculum ((3.2E+05 conidia/mL in 10% white grape juice in water) was pre-mixed with an equal volume of a treatment solution selected from 10% diluted white grape juice in water (as untreated control), 5 mM MES buffer, 375 mM CGI factor HH38 in 2% DMSO (v/v) in 5 mM MES buffer, and 2% DMSO (v/v) in water. Twenty microliters of a given treatment mixture were pipetted onto a leaf quadrant (3 replicate leaves per treatment for a total of 12 quadrants). After 7 days incubation in a growth chamber, leaves were photographed, destained in 70% ethanol, photographed again, and the area of the fungal lesions quantified using ImageJ software. In this experiment, the fungal lesions in the leaf quadrants treated with the CGI factor HH38 peptide were 44% smaller than the untreated (diluted grape juice) control, a difference that was statistically significant using an unpaired t test. The fungal lesions in the HH38 treatment were also observed to be 39% smaller than in the 2% DMSO treatment, and 19% smaller than in the 5 mM MES treatment, although not to a statistically significant degree using an unpaired t test. These data indicate that topical application of the synthetic CGI factor HH38 (SEQ ID NO:2189) inhibited Botrytis cinerea growth on Nicotiana benthamiana leaves to a statistically significant degree.

### Example 15

[0133] This example illustrates an example of a synthetic antifungal peptide having an amino acid sequence derived from that of a naturally occurring CGI factor peptide and further including additional amino acids to provide a desired functionality. More specifically this example describes the antifungal activity of a synthetic CGI factor peptide having the amino acid sequence of a Saccharomyces cerevisiae alpha pheromone (WHWLQLKPGQPMY, SEQ ID NO: 2184) fused at its C-terminus to an octoarginine cell-penetrating peptide (CPP) sequence, WHWLQLKPGQPMYRRRRRRRR (SEQ ID NO: 2240). Other embodiments of synthetic antifungal peptides include peptides that have the amino acid sequence of at least one CGI peptide (e.g., a sequence selected from the group consisting of SEQ ID NOs: 961-1920, SEQ ID NOs: 1957-2189, SEQ ID NO: 2194-2210, SEQ ID NO: 2215-2243, SEQ ID NO: 2457-3361, and SEQ ID NO: 5707-5731), fused at its C-terminus to a polyarginine CPP sequence, a polylysine CPP sequence, a Tat basic domain sequence (RKKRRQRRR, SEQ ID NO: 5736), a BP100 CPP sequence (KKLFKKILKYL, SEQ ID NO:5737), a D-R9 CPP sequence (rrrrrrrrr (D form), SEQ ID NO:5738), a KLA10 CPP sequence (KALKKLLAKWLAAAKALL, SEQ ID NO:5739), a dhvar5 CPP sequence (LLLFLLKKRKKRKY, SEQ ID NO:5740), an HPV33L2-445/467 CPP sequence (SYFILRRRRKRFPYFFTDVRVAA, SEQ ID NO:5741), a Crot(27-29) derivative(2) CPP sequence (KMDCRWRWKCCKK, SEQ ID NO:5742), a CyLoP-1 CPP sequence (CRWRWKCCKK, SEQ ID NO: 5743), a M511 CPP sequence (FLGKKFKKYFLQLLK, SEQ ID NO:5744), a E162 CPP sequence (KTVLLRKLLKLLVRKI, SEQ ID NO:5745), an MG2d CPP sequence (GIGKFLHSAKKWGKAFVGQIMNC, SEQ ID NO:5746), or another CPP sequence (e.g., cell-penetrating peptide sequences publicly disclosed at CPPsite, crdd[dot]osdd[dot]net/raghava/cppsite/or disclosed in Numata et al. (2018) Scientific Reports, 8:10966, DOI:10.1038/s41598-018-29298-6).

[0134] Several CGI factor peptides were synthesized and screened against a panel of several fungal pathogens. The pathogens were grown in a modified RPMI medium (see Vicente et al. (2009) Mycol. Res., 113:754-757, DOI:10.1016/j.mycres.2009.02.011) at 25 degrees Celsius. Incubation times varied according to the species: 24 hours for Fusarium culmorum, 22 hours for Fusarium graminearum, 7 days for Phytophthora infestans, and 5 days for Zymoseptoria tritici. Peptides were dissolved in DMSO and diluted into the modified RPMI medium; precipitation was observed for a number of the peptides when an attempt was made to dissolve these in the fungal culture medium and these experiments were therefore disregarded. Nonetheless, a synthetic CGI factor peptide containing the octoarginine CPP sequence (SEQ ID NO: 2240) was observed to strongly inhibit (≥50% inhibition relative to a control) the important plant pathogens Fusarium culmorum (fungal causal agent of several “blights” and “rots” of various dicots and monocots including cereal crops; 24 hours incubation), Fusarium graminearum (anamorph of Gibberella zeae, and the fungal causative agent of fusarium head blight in wheat and barley, and of maize ear and stalk rots; 22 hours incubation), Phytophthora infestans (the oomycotal or “fungal” causative agent of tomato late blight and potato blight; 7 days incubation), and Zymoseptoria tritici (Septoria tritici, the fungal causative agent of Septoria leaf blotch in wheat; 5 days incubation). Thus, related embodiments include methods for treating or preventing infection or disease caused by Fusarium culmorum, Fusarium graminearum, Phytophthora infestans, and Zymoseptoria tritici, by providing to a plant infected with or at risk of infection by one or more of these pathogens, at least one CGI peptide or at least one synthetic polypeptide having a sequence that includes one or more CGI factor peptide sequences and a cell-penetrating peptide sequence; specific embodiments of the synthetic polypeptides include a polypeptide having the sequence of a CGI factor peptide selected from SEQ ID NOs: 961-1920, SEQ ID NOs: 1957-2189, SEQ ID NO: 2194-2210, SEQ ID NO: 2215-2243, SEQ ID NO: 2457-3361, and SEQ ID NO: 5707-5731 fused at its C-terminus to a polyarginine CPP sequence such as octoarginine or nonoarginine.

### Example 16

[0135] This example illustrates a method for reducing or inhibiting growth of a fungal pathogen by contacting a fungal pathogen with a composition including at least one conidial germination inhibiting (CGI) factor, a CGI factor precursor, a CGI factor fragment, or a CGI factor motif derived from a least one of the fungal pathogen, a fungus in the same genus as the fungal pathogen, a fungus in a different genus than the fungal pathogen, or a mixture thereof.

[0136] Experiments for testing the ability of CGI factors to inhibit the growth or to kill fungal pathogens were performed with the native Botrytis cinerea alpha pheromone WCGRPGQPC (SEQ ID NO: 2183), the native Saccharomyces cerevisiae alpha pheromone WHWLQLKPGQPMY (SEQ ID NO: 2184), and the synthetic CGI factor “HH38”, with the amino acid sequence WHWLQLKPGQPMYGGGGSWHWLQLKPGQPMY (SEQ ID NO:2189, a homodimer of the native Saccharomyces cerevisiae alpha pheromone with an added GGGG linker). The CGI factor peptides were synthesized and provided as lyophilized powder; for screening, the peptides were dissolved in DMSO and diluted to 9375 micromolar stocks in 50% DMSO.

[0137] The fungal species and strains selected for testing are listed in Table 9. These are either mycelium-forming fungi or grow as yeasts. Fungal stocks were first grown on an appropriate revival medium at 30 degrees Celsius before being grown on in the assay medium at 37 degrees Celsius.

TABLE 9

| | | | Revival | Assay |
|---|---|---|---|---|
| Species | Strain | Source | medium* | medium* |
| Aspergillus fumigatus | CBS 120.53 | Human lung, | PDA | AFT04 |
| | | bronchus, and lingula | | |
| Aspergillus flavus | DSM 1959 | Non-clinical isolate | PDA | AFT04 |
| | | (shoe sole) | | |
| Candida albicans | ATCC 10231 | Human with | TM186 | AFT04 |
| | | bronchomycosis | | |
| Candida parapsilosis | DSM 4237 | Clinical isolate | TM186 | AFT04 |
| Fusarium oxysporum | CBS 130311 | Lungs of patient | PDA | AFT04 |
| | | with lung disease | | |
| Mucor circinelloides f. | CBS 204.68 | Iguana, lung | PDA | AFT04 |
| janssenii | | | | |
| Rhizomucor miehei | CBS 147454 | Human lung tissue, | PDA | AFT04 |
| | | oncology patient | | |
| Malassezia furfur | DSM 6170 | Human skin | MLNA | (tbd) |
| Candida auris | DSM 21092 | Human ear, external | TM186 | AFT04 |
| | | canal | | |
| Cryptococcus neoformans | DSM 70219 | Human | TM186 | AFT04 |

*“PDA” = potato dextrose agar: 24.0 g potato dextrose broth (Difco 254920), 15.0 g agar (Roth 5210) in 1000 mL deionized water, pH adjusted to 7.0. “TM186” = universal medium for yeasts: yeast extract 3.0 g, malt extract 3.0 g, peptone from soybeans 5.0 g, glucose 10.0 g, agar 15.0 g, in 1000 mL distilled water “MLNA” = modified Leeming & Notman Agar: 5.0 g peptone (Bacto 211577), 5.0 g tryptone (Bacto 211705), 10.0 g glucose (Roth HN06), 11.5 g 87% glycerol, 2.0 g wheat extract (Merck 103753), 8.0 g ox bile (Fluka 70168), 0.5 g glycerol monostearate (Alfa Aesar 43883), 5.0 mL Tween 60, 20.0 mL olive oil, 15.0 g agar (Roth 5210) in 1000 mL deionized water, pH adjusted to 6.0 “AFT04”: 50.0 mL RPMI 1640 (10X, with glucose and phenol red, Sigma R1145), 0.15 g L-glutamine (Applichem A3734), 17.26 g MOPS (3-(N-Morpholino)-propansulfonic acid), 450 mL deionized water, pH adjusted to 7.0 and 0.5 mg folic acid (filter-sterilized stock, Sigma F8758) added.

[0138] The screening process was performed as a micro broth dilution assay in 96-well plates. The procedure was a modification of the guidelines provided by the Clinical and Laboratory Standards Institute (CLSI, clsi[dot]org) or in the Deutsches Institut für Normung e. V. (DIN, din[dot]de) standardized methods. Inoculation titres for the test plates were 0.5 to 5×10\hat{ }4 for fungal spores and 1 to 2.5×10\hat{ }3 for yeast cells. Mycelium formation was observed to often be unevenly distributed through the wells, and therefore fungal growth was further evaluated by inspection by microscope.

[0139] Preliminary results for the three peptides were as follows. No inhibition of growth of Aspergillus fumigatus, Aspergillus flavus, Fusarium oxysporum, Mucor circinelloides f. janssenii, or Rhizomucor miehei was observed after 3 days of incubation with either the Botrytis alpha pheromone (SEQ ID NO: 2183) or the Saccharomyces alpha pheromone (SEQ ID NO: 2184) at concentrations of 375 micromolar or 187.5 micromolar, but the synthetic CGI factor “HH38” (SEQ ID NO:2189) sometimes induced changes in growth pattern. No inhibition of growth of Candida albicans, Candida parapsilosis, or Candida auris was observed after 1 day of incubation with any of the three peptides at either 375 or 187.5 micromolar. Both the Botrytis alpha pheromone (SEQ ID NO: 2183) and the Saccharomyces alpha pheromone (SEQ ID NO: 2184) at concentrations of 375 micromolar reduced growth of Cryptococcus neoformans after 2 days of incubation, and the synthetic CGI factor “HH38” (SEQ ID NO: 2189) at 375 micromolar was observed to change this species' growth pattern. As these are preliminary results, the assays are being further refined to allow investigation of CGI peptide antifungal activity across a range of human or animal fungal pathogens.

### Example 17

[0140] This example illustrates a method for reducing or inhibiting growth of a fungal pathogen by contacting a fungal pathogen with a composition including at least one conidial germination inhibiting (CGI) factor, a CGI factor precursor, a CGI factor fragment, or a CGI factor motif derived from a least one of the fungal pathogen, a fungus in the same genus as the fungal pathogen, a fungus in a different genus than the fungal pathogen, or a mixture thereof. More specifically, this example illustrates use of a live-cell imaging system to investigate the effects of putative CGI factor peptides.

[0141] An oCelloScope™ (BioSense Solutions ApS, Farum, DK) optical detection system was employed to image 96-well plates containing conidia of Fusarium proliferatum, grown out to 22 hours in 30% diluted potato dextrose broth. Fungal growth was determined by using a “segmentation and extraction of surface areas” (“SESA”) algorithm; see Fredborg et al. (2013) J. Clinical Microbiol., 51:2047-2053; DOI:10.1128/JCM.00440-13. Ten CGI factor peptides were tested, including three naturally occurring alpha pheromone peptides and seven synthetic CGI factor having amino acid sequences derived from one or more naturally occurring alpha pheromone peptide sequences, including the following: (1) “HH1”, Fusarium graminearum alpha pheromone (WCTWKGQPCW, SEQ ID NO:2182); (2) “HH2” Botrytis cinerea alpha pheromone (WCGRPGQPC, SEQ ID NO: 2183); (3) “HH3” Saccharomyces cerevisiae alpha pheromone (WHWLQLKPGQPMY, SEQ ID NO: 2184); (4) “HH31” rearranged Saccharomyces cerevisiae alpha pheromone sequence (WKMGQYHQLPPLW, SEQ ID NO:2185); (5) “HH35” Saccharomyces cerevisiae alpha pheromone with C-terminal glycine (WHWLQLKPGQPMYG, SEQ ID NO:2186); (6) “HH36” Saccharomyces cerevisiae alpha pheromone with N-terminal glycine (GWHWLQLKPGQPMY, SEQ ID NO: 2187); (7) “HH37” Saccharomyces cerevisiae alpha pheromone homodimer with no linker (WHWLQLKPGQPMYWHWLQLKPGQPMY, SEQ ID NO:2188); (8) “HH38” Saccharomyces cerevisiae alpha pheromone homodimer including glycine linker (WHWLQLKPGQPMYGGGGSWHWLQLKPGQPMY, SEQ ID NO:2189); (9) “HH4” Saccharomyces cerevisiae alpha pheromone and Fusarium graminearum alpha pheromone heterodimer with no linker WHWLQLKPGQPMYWCTWKGQPCW (SEQ ID NO: 2231); and (10) “HH42” Fusarium graminearum alpha pheromone and Saccharomyces cerevisiae alpha pheromone heterodimer with no linker WCTWKGQPCWWHWLQLKPGQPMY (SEQ ID NO: 2233).

[0142] The CGI factor peptides were prepared in 30% potato dextrose broth and as some precipitation was observed, were filtered through a 1 mL syringe filter (PALL Acrodisc syringe filters fitted with 0.2 micron Ultipor nylon membrane); the CGI factor peptide concentrations given in the table are therefore treated as nominal (and minimal) concentrations. The results from this assay are provided in Table 10 as SESA values normalized against the untreated control.

TABLE 10

| | Concentration (micromolar) | | | | | | | |
|---|---|---|---|---|---|---|---|---|
| | 100 | | 178.5 | | 250 | | 375 | |
| Peptide | x̅ | σ | x̅ | σ | x̅ | σ | x̅ | σ |
| HH1 | na | na | na | na | 1.554 | 0.107 | 1.510 | 0.244 |
| HH2 | na | na | na | na | 1.540 | 0.218 | 1.743 | 0.218 |
| HH3 | na | na | na | na | 0.935 | 0.151 | 0.317 | 0.164 |
| HH31 | na | na | na | na | 0.850 | 0.556 | 0.439 | 0.155 |
| HH35 | na | na | na | na | 1.119 | 0.094 | 0.742 | 0.297 |
| HH36 | na | na | na | na | 0.519 | 0.439 | 0.367 | 0.251 |
| HH37 | 0.330 | 0.126 | 0.351 | 0.241 | na | na | na | na |
| HH38 | 0.268 | 0.306 | 0.813 | 0.256 | na | na | na | na |
| HH4 | 0.436 | 0.496 | 0.935 | 0.568 | na | na | na | na |
| HH42 | 0.303 | 0.303 | 0.430 | 0.526 | na | na | na | na |

Untreated

| | x̅ | σ |
|---|---|---|
| Untreated | 1.645 | 0.260 |
| Control | | |

na = not applicable; not tested at this concentration

[0143] Normalized values for Fusarium proliferatum treated with the HH3, HH31, HH35, and HH36 peptides at the nominal concentration of 375 micromolar were significantly lower than the untreated control; HH3, HH 35, and HH36 also displayed statistically significant antifungal activity at the nominal concentration of 250 micromolar. Four of the synthetic CGI factor peptides (HH37, HH38, HH4, and HH42) showed statistically significant antifungal activity at the lowest concentration tested, a nominal concentration of 100 micromolar; notably, these peptides are longer than the naturally occurring alpha pheromone peptides tested, being homo- or heterodimers with or without additional linking amino acids, indicating that antifungal activity might be improved by selecting a longer CGI peptide or by increasing the length of a CGI peptide sequence.

[0144] Although the foregoing disclosure describes aspects and embodiments of the invention in some detail by way of illustration and examples, the description and examples should not be construed as limiting the scope of the invention. Further embodiments are disclosed within the claims. The disclosures of all patent and scientific literature cited in this disclosure are expressly incorporated by reference in their entirety herein.

1-21. (canceled)

22: An antifungal composition for decreasing growth or reproduction of a fungus, comprising:
an effective amount of at least one conidial germination-inhibiting (CGI) factor or precursor thereof,
wherein the CGI factor comprises an amino acid sequence that has at least 90% sequence identity with a sequence selected from the group consisting of SEQ ID NO:2189, SEQ ID NO:2240, SEQ ID NO: 961-1920, SEQ ID NO: 1957-2189, SEQ ID NO: 2194-2210, SEQ ID NO: 2215-2243, SEQ ID NO: 2457-3361, and SEQ ID NO: 5707-5731, and
wherein the nucleotide sequence encoding the at least one CGI factor or precursor thereof, does not occur in the genome of the fungus; and
optionally, an agriculturally or pharmaceutically acceptable carrier.

23: The antifungal composition of claim 22, wherein the at least one CGI factor or precursor thereof is provided as a polypeptide that further comprises one or more of the group consisting of (a) a secretion signal peptide, (b) a localization signal, (c) a detectable or immunogenic marker, (d) a cleavage sequence, (e) a flanking or linking amino acid sequence, (f) a cell-penetrating peptide, and (g) a self-assembling peptide.

24. (canceled)

25: The antifungal composition of claim 22, formulated as a particulate, a solid, a liquid, a gel, a lipid nanoparticle, a suspension, an emulsion, an encapsulation, a powder, granules, a paint, a film, a coating, a spray, a seed coat, a seed treatment, a foliar spray treatment, a foliar drench treatment, a Ready-To-Use (RTU) formulation, a produce coating, a bait, a suspension concentrate, a tank-mix, an aerosol, a root dip, a soil drench, a fog, a soil treatment, an irrigation formulation, or a sprinkler formulation, wherein the antifungal composition optionally further comprises:
(a) one or more additional components selected from an herbicide, insecticide, nematicide, fungicide (other than the CGI factor or precursor thereof), attractant, or bait; and/or
(b) at least one agriculturally acceptable carrier selected from the group consisting of an adjuvant, an inert component, a dispersant, a surfactant, a tackifier, a binder, and a stabilizer.

26: A method of decreasing growth or reproduction of a fungus, comprising providing a fungus with the antifungal composition of claim 22, whereby the growth or reproduction of the fungus is decreased, relative to a control fungus not provided with the antifungal composition, optionally wherein the decrease in growth or reproduction of the fungus comprises a reduction in conidial germination or viability of the fungus.

27. (canceled)

28: The method of claim 26, wherein the composition is provided to the fungus by directly contacting the fungus with the composition, or by delivering the composition to the environment of the fungus, or by expressing in the environment of the fungus a recombinant DNA construct comprising a nucleotide sequence that encodes the at least one conidial CGI factor or precursor thereof.

29: The method of claim 26, wherein the fungus is a pathogen of a plant or of an animal, or is a structural element fungal pathogen, and wherein the method results in preventing or reducing disease or damage caused by the fungus.

30: The method of claim 26, wherein the fungus is at least one selected from the group consisting of Botrytis sp., Fusarium sp., Phytophthora sp., Zymoseptoria sp., Aspergillus sp., Magnaporthe sp., Puccinia sp., Blumeria sp., Mycosphaerella sp., Colletotrichum sp., Ustilago sp., Melampsora sp., Phakopsora sp., Rhizoctonia sp., Aspergillus sp., Candida sp., Coccidioides sp., Histoplasma sp., Cryptococcus sp., Pneumocystis sp., and Blastomyces sp.

31: The method of claim 26, wherein the fungus is at least one selected from the group consisting of Botrytis sp., Fusarium sp., Phytophthora sp., and Zymoseptoria sp., and wherein the CGI factor or precursor thereof is provided as a polypeptide comprising a multimer of a fungal alpha pheromone or as a polypeptide comprising a fungal alpha pheromone and a cell-penetrating peptide.

32: The method of claim 26, wherein the fungus is:
(a) Botrytis sp. or Fusarium sp. and the CGI factor has the amino acid sequence of SEQ ID NO: 2189;
(b) Fusarium sp., Phytophthora sp., and Zymoseptoria sp. and the CGI factor has the amino acid sequence of SEQ ID NO:2240; or
(c) Cryptococcus sp. and the CGI factor has the amino acid sequence of SEQ ID NO: 2183, SEQ ID NO: 2184, or SEQ ID NO:2189.

33: A method of preventing or reducing disease caused by a fungal pathogen of a plant, comprising providing to a plant the antifungal composition of claim 22, whereby disease caused by the fungal pathogen is prevented or decreased in the plant, relative to a control plant not provided with the antifungal composition.

34: The method of claim 33, wherein the fungal pathogen is one or more selected from the group consisting of Botrytis sp., Fusarium sp., Phytophthora sp., Zymoseptoria sp., Aspergillus sp., Magnaporthe sp., Puccinia sp., Blumeria sp., Mycosphaerella sp., Colletotrichum sp., Ustilago sp., Melampsora sp., Phakopsora sp., and Rhizoctonia sp.

35: The method of claim 33, wherein the fungal pathogen is at least one selected from the group consisting of Botrytis sp., Fusarium sp., Phytophthora sp., and Zymoseptoria sp., and wherein the CGI factor or precursor thereof is provided as a polypeptide comprising a multimer of a fungal alpha pheromone or as a polypeptide comprising a fungal alpha pheromone and a cell-penetrating peptide.

36: The method of claim 33, wherein the fungal pathogen is:
(a) Botrytis sp. or Fusarium sp. and the CGI factor has the amino acid sequence of SEQ ID NO: 2189;
(b) Fusarium sp., Phytophthora sp., and Zymoseptoria sp. and the CGI factor has the amino acid sequence of SEQ ID NO:2240; or
(c) Cryptococcus sp. and the CGI factor has the amino acid sequence of SEQ ID NO: 2183, SEQ ID NO: 2184, or SEQ ID NO:2189.

37: A method of treating a subject with or at risk of a disease caused by a fungus, comprising administering to the subject the antifungal composition of claim 22, whereby the fungal disease is prevented or decreased in the subject, relative to a control subject not provided with the antifungal composition.

38: The method of claim 37, wherein the subject is:
(a) an animal selected from the group consisting of an invertebrate, an amphibian, a reptile, a bird, a cartilaginous or bony fish, and a non-human mammal; or
(b) a human.

39: A recombinant DNA construct comprising a heterologous promoter operably linked to a nucleic acid molecule comprising a nucleotide sequence that encodes a conidial germination-inhibiting (CGI) factor or precursor thereof,
wherein the nucleotide sequence
(a) encodes at least one CGI factor comprising an amino acid sequence that has at least 90% sequence identity with at least one of SEQ ID NO:2189, SEQ ID NO: 2240, SEQ ID NO: 961-1920, SEQ ID NO: 1957-2189, SEQ ID NO: 2194-2210, SEQ ID NO: 2215-2243, SEQ ID NO: 2457-3361, or SEQ ID NO: 5707-5731 or precursor thereof;
and wherein the nucleotide sequence optionally has codons optimized for heterologous expression.

40: The recombinant DNA construct of claim 39, wherein the nucleotide sequence encodes (a) at least one copy of a CGI factor, (b) at least one copy each of two or more CGI factors, (c) at least one CGI factor precursor, or (d) any combination of (a), (b), and (c).

41: The recombinant DNA construct of claim 39, wherein the nucleotide sequence encodes a polypeptide that further comprises one or more of the group consisting of (a) a secretion signal peptide, (b) a localization signal, (c) a detectable or immunogenic marker, (d) a cleavage sequence, (e) a flanking or linking amino acid sequence, (f) a cell-penetrating peptide, and (g) a self-assembling peptide.

The application's sequence listing, which the Patent Office published only in electronic form, follows.

SEQUENCE LISTING (5746 sequences)

SEQ ID NO: 1 - DNA, 27 bp, Eremothecium cymbalariae
  source 1..27: mol_type = other DNA; strain = DBVPG
tggcactggctgagatttgatcgtggt

SEQ ID NO: 2 - DNA, 36 bp, Eremothecium cymbalariae
  source 1..36: mol_type = other DNA; strain = DBVPG
tggcactggttgagattcgaccgtggtcaaccaatt

SEQ ID NO: 3 - DNA, 36 bp, Eremothecium cymbalariae
  source 1..36: mol_type = other DNA; strain = DBVPG
tggcactggttaagattctccaaaggtgaaccgttg

SEQ ID NO: 4 - DNA, 33 bp, Eremothecium cymbalariae
  source 1..33: mol_type = other DNA; strain = DBVPG
tggcactggttaagattctccaaaggtgaaccg

SEQ ID NO: 5 - DNA, 39 bp, Eremothecium cymbalariae
  source 1..39: mol_type = other DNA; strain = DBVPG
tggcattggctaagattcaaccgtggcgaacccatgtac

SEQ ID NO: 6 - DNA, 33 bp, Eremothecium cymbalariae
  source 1..33: mol_type = other DNA; strain = DBVPG
tggcattggctgagattcaaccgtggtgaaccc

SEQ ID NO: 7 - DNA, 39 bp, Saccharomyces cerevisiae
  source 1..39: mol_type = other DNA; strain = YJM993
tggcattggctgcaactaaagcctggccaaccaatgtac

SEQ ID NO: 8 - DNA, 39 bp, Saccharomyces cerevisiae
  source 1..39: mol_type = other DNA; strain = YJM993
tggcactggttaaatttgagaccaggccaaccaatgtac

SEQ ID NO: 9 - DNA, 39 bp, Saccharomyces cerevisiae
  source 1..39: mol_type = other DNA; strain = YJM993
tggcactggttgcaactcaagccaggccaaccaatgtac

SEQ ID NO: 10 - DNA, 39 bp, Saccharomyces cerevisiae
  source 1..39: mol_type = other DNA; strain = YJM1078
tggcactggttaaacttgagaccaggccaaccaatgtac

SEQ ID NO: 11 - DNA, 39 bp, Saccharomyces cerevisiae; identical to SEQ ID NO: 9
  source 1..39: mol_type = other DNA; strain = YJM1078

SEQ ID NO: 12 - DNA, 39 bp, Saccharomyces cerevisiae
  source 1..39: mol_type = other DNA; strain = YJM1078
tggcattggttgcagttaaaacccggccaaccaatgtac

SEQ ID NO: 13 - DNA, 39 bp, Saccharomyces cerevisiae; identical to SEQ ID NO: 8
  source 1..39: mol_type = other DNA; strain = YJM189

SEQ ID NO: 14 - DNA, 39 bp, Saccharomyces cerevisiae; identical to SEQ ID NO: 9
  source 1..39: mol_type = other DNA; strain = YJM189

SEQ ID NO: 15 - DNA, 39 bp, Saccharomyces cerevisiae; identical to SEQ ID NO: 8
  source 1..39: mol_type = other DNA; strain = YJM193

SEQ ID NO: 16 - DNA, 39 bp, Saccharomyces cerevisiae; identical to SEQ ID NO: 9
  source 1..39: mol_type = other DNA; strain = YJM193

SEQ ID NO: 17 - DNA, 39 bp, Saccharomyces cerevisiae; identical to SEQ ID NO: 10
  source 1..39: mol_type = other DNA; strain = YJM195

SEQ ID NO: 18 - DNA, 39 bp, Saccharomyces cerevisiae; identical to SEQ ID NO: 9
  source 1..39: mol_type = other DNA; strain = YJM195

SEQ ID NO: 19 - DNA, 39 bp, Saccharomyces cerevisiae; identical to SEQ ID NO: 10
  source 1..39: mol_type = other DNA; strain = YJM244

SEQ ID NO: 20 - DNA, 39 bp, Saccharomyces cerevisiae; identical to SEQ ID NO: 9
  source 1..39: mol_type = other DNA; strain = YJM244

SEQ ID NO: 21 - DNA, 39 bp, Saccharomyces cerevisiae; identical to SEQ ID NO: 10
  source 1..39: mol_type = other DNA; strain = YJM248

SEQ ID NO: 22 - DNA, 39 bp, Saccharomyces cerevisiae; identical to SEQ ID NO: 9
  source 1..39: mol_type = other DNA; strain = YJM248

SEQ ID NO: 23 - DNA, 39 bp, Saccharomyces cerevisiae; identical to SEQ ID NO: 8
  source 1..39: mol_type = other DNA; strain = YJM270

SEQ ID NO: 24 - DNA, 39 bp, Saccharomyces cerevisiae; identical to SEQ ID NO: 9
  source 1..39: mol_type = other DNA; strain = YJM270

SEQ ID NO: 25 - DNA, 39 bp, Saccharomyces cerevisiae; identical to SEQ ID NO: 8
  source 1..39: mol_type = other DNA; strain = YJM271

SEQ ID NO: 26 - DNA, 39 bp, Saccharomyces cerevisiae; identical to SEQ ID NO: 9
  source 1..39: mol_type = other DNA; strain = YJM271

SEQ ID NO: 27 - DNA, 39 bp, Saccharomyces cerevisiae; identical to SEQ ID NO: 8
  source 1..39: mol_type = other DNA; strain = YJM320

SEQ ID NO: 28 - DNA, 39 bp, Saccharomyces cerevisiae; identical to SEQ ID NO: 9
  source 1..39: mol_type = other DNA; strain = YJM320

SEQ ID NO: 29 - DNA, 39 bp, Saccharomyces cerevisiae; identical to SEQ ID NO: 8
  source 1..39: mol_type = other DNA; strain = YJM428

SEQ ID NO: 30 - DNA, 39 bp, Saccharomyces cerevisiae; identical to SEQ ID NO: 9
  source 1..39: mol_type = other DNA; strain = YJM428

SEQ ID NO: 31 - DNA, 39 bp, Saccharomyces cerevisiae; identical to SEQ ID NO: 10
  source 1..39: mol_type = other DNA; strain = YJM450

SEQ ID NO: 32 - DNA, 39 bp, Saccharomyces cerevisiae; identical to SEQ ID NO: 9
  source 1..39: mol_type = other DNA; strain = YJM450

SEQ ID NO: 33 - DNA, 39 bp, Saccharomyces cerevisiae; identical to SEQ ID NO: 10
  source 1..39: mol_type = other DNA; strain = YJM451

SEQ ID NO: 34 - DNA, 39 bp, Saccharomyces cerevisiae; identical to SEQ ID NO: 9
  source 1..39: mol_type = other DNA; strain = YJM451

SEQ ID NO: 35 - DNA, 39 bp, Saccharomyces cerevisiae; identical to SEQ ID NO: 8
  source 1..39: mol_type = other DNA; strain = YJM453

SEQ ID NO: 36 - DNA, 39 bp, Saccharomyces cerevisiae; identical to SEQ ID NO: 9
  source 1..39: mol_type = other DNA; strain = YJM453

SEQ ID NO: 37 - DNA, 39 bp, Saccharomyces cerevisiae; identical to SEQ ID NO: 10
  source 1..39: mol_type = other DNA; strain = YJM456

SEQ ID NO: 38 - DNA, 39 bp, Saccharomyces cerevisiae; identical to SEQ ID NO: 9
  source 1..39: mol_type = other DNA; strain = YJM456

SEQ ID NO: 39 - DNA, 39 bp, Saccharomyces cerevisiae; identical to SEQ ID NO: 10
  source 1..39: mol_type = other DNA; strain = YJM470

SEQ ID NO: 40 - DNA, 39 bp, Saccharomyces cerevisiae; identical to SEQ ID NO: 9
  source 1..39: mol_type = other DNA; strain = YJM470

SEQ ID NO: 41 - DNA, 39 bp, Saccharomyces cerevisiae; identical to SEQ ID NO: 8
  source 1..39: mol_type = other DNA; strain = YJM541

SEQ ID NO: 42 - DNA, 39 bp, Saccharomyces cerevisiae; identical to SEQ ID NO: 9
  source 1..39: mol_type = other DNA; strain = YJM541

SEQ ID NO: 43 - DNA, 39 bp, Saccharomyces cerevisiae; identical to SEQ ID NO: 10
  source 1..39: mol_type = other DNA; strain = YJM554

SEQ ID NO: 44 - DNA, 39 bp, Saccharomyces cerevisiae; identical to SEQ ID NO: 9
  source 1..39: mol_type = other DNA; strain = YJM554

SEQ ID NO: 45 - DNA, 39 bp, Saccharomyces cerevisiae; identical to SEQ ID NO: 10
  source 1..39: mol_type = other DNA; strain = YJM555

SEQ ID NO: 46 - DNA, 39 bp, Saccharomyces cerevisiae; identical to SEQ ID NO: 9
  source 1..39: mol_type = other DNA; strain = YJM555

SEQ ID NO: 47 - DNA, 39 bp, Saccharomyces cerevisiae; identical to SEQ ID NO: 10
  source 1..39: mol_type = other DNA; strain = YJM627

SEQ ID NO: 48 - DNA, 39 bp, Saccharomyces cerevisiae; identical to SEQ ID NO: 9
  source 1..39: mol_type = other DNA; strain = YJM627

SEQ ID NO: 49 - DNA, 39 bp, Saccharomyces cerevisiae; identical to SEQ ID NO: 8
  source 1..39: mol_type = other DNA; strain = YJM681

SEQ ID NO: 50 - DNA, 39 bp, Saccharomyces cerevisiae; identical to SEQ ID NO: 9
  source 1..39: mol_type = other DNA; strain = YJM681

SEQ ID NO: 51 - DNA, 39 bp, Saccharomyces cerevisiae; identical to SEQ ID NO: 10
  source 1..39: mol_type = other DNA; strain = YJM682

SEQ ID NO: 52 - DNA, 39 bp, Saccharomyces cerevisiae; identical to SEQ ID NO: 9
  source 1..39: mol_type = other DNA; strain = YJM682

SEQ ID NO: 53 - DNA, 39 bp, Saccharomyces cerevisiae; identical to SEQ ID NO: 8
  source 1..39: mol_type = other DNA; strain = YJM683

SEQ ID NO: 54 - DNA, 39 bp, Saccharomyces cerevisiae; identical to SEQ ID NO: 9
  source 1..39: mol_type = other DNA; strain = YJM683

SEQ ID NO: 55 - DNA, 39 bp, Saccharomyces cerevisiae; identical to SEQ ID NO: 10
  source 1..39: mol_type = other DNA; strain = YJM693

SEQ ID NO: 56 - DNA, 39 bp, Saccharomyces cerevisiae; identical to SEQ ID NO: 9
  source 1..39: mol_type = other DNA; strain = YJM693

SEQ ID NO: 57 - DNA, 39 bp, Saccharomyces cerevisiae; identical to SEQ ID NO: 8
  source 1..39: mol_type = other DNA; strain = YJM969

SEQ ID NO: 58 - DNA, 39 bp, Saccharomyces cerevisiae; identical to SEQ ID NO: 9
  source 1..39: mol_type = other DNA; strain = YJM969

SEQ ID NO: 59 - DNA, 39 bp, Saccharomyces cerevisiae; identical to SEQ ID NO: 8
  source 1..39: mol_type = other DNA; strain = YJM972

SEQ ID NO: 60 - DNA, 39 bp, Saccharomyces cerevisiae; identical to SEQ ID NO: 9
  source 1..39: mol_type = other DNA; strain = YJM972

SEQ ID NO: 61 - DNA, 39 bp, Saccharomyces cerevisiae; identical to SEQ ID NO: 8
  source 1..39: mol_type = other DNA; strain = YJM975

SEQ ID NO: 62 - DNA, 39 bp, Saccharomyces cerevisiae; identical to SEQ ID NO: 9
  source 1..39: mol_type = other DNA; strain = YJM975

SEQ ID NO: 63 - DNA, 39 bp, Saccharomyces cerevisiae; identical to SEQ ID NO: 8
  source 1..39: mol_type = other DNA; strain = YJM978

SEQ ID NO: 64 - DNA, 39 bp, Saccharomyces cerevisiae; identical to SEQ ID NO: 9
  source 1..39: mol_type = other DNA; strain = YJM978

SEQ ID NO: 65 - DNA, 39 bp, Saccharomyces cerevisiae; identical to SEQ ID NO: 8
  source 1..39: mol_type = other DNA; strain = YJM981

SEQ ID NO: 66 - DNA, 39 bp, Saccharomyces cerevisiae; identical to SEQ ID NO: 9
  source 1..39: mol_type = other DNA; strain = YJM981

SEQ ID NO: 67 - DNA, 39 bp, Saccharomyces cerevisiae; identical to SEQ ID NO: 8
  source 1..39: mol_type = other DNA; strain = YJM984

SEQ ID NO: 68 - DNA, 39 bp, Saccharomyces cerevisiae; identical to SEQ ID NO: 9
  source 1..39: mol_type = other DNA; strain = YJM984

SEQ ID NO: 69 - DNA, 39 bp, Saccharomyces cerevisiae; identical to SEQ ID NO: 8
  source 1..39: mol_type = other DNA; strain = YJM987

SEQ ID NO: 70 - DNA, 39 bp, Saccharomyces cerevisiae; identical to SEQ ID NO: 9
  source 1..39: mol_type = other DNA; strain = YJM987

SEQ ID NO: 71 - DNA, 39 bp, Saccharomyces cerevisiae; identical to SEQ ID NO: 8
  source 1..39: mol_type = other DNA; strain = YJM990

SEQ ID NO: 72 - DNA, 39 bp, Saccharomyces cerevisiae; identical to SEQ ID NO: 9
  source 1..39: mol_type = other DNA; strain = YJM990

SEQ ID NO: 73 - DNA, 39 bp, Saccharomyces cerevisiae; identical to SEQ ID NO: 8
  source 1..39: mol_type = other DNA; strain = YJM996

SEQ ID NO: 74 - DNA, 39 bp, Saccharomyces cerevisiae; identical to SEQ ID NO: 9
  source 1..39: mol_type = other DNA; strain = YJM996

SEQ ID NO: 75 - DNA, 39 bp, Saccharomyces cerevisiae; identical to SEQ ID NO: 8
  source 1..39: mol_type = other DNA; strain = YJM1083

SEQ ID NO: 76 - DNA, 39 bp, Saccharomyces cerevisiae; identical to SEQ ID NO: 9
  source 1..39: mol_type = other DNA; strain = YJM1083

SEQ ID NO: 77 - DNA, 39 bp, Saccharomyces cerevisiae; identical to SEQ ID NO: 8
  source 1..39: mol_type = other DNA; strain = YJM1129

SEQ ID NO: 78 - DNA, 39 bp, Saccharomyces cerevisiae; identical to SEQ ID NO: 9
  source 1..39: mol_type = other DNA; strain = YJM1129

SEQ ID NO: 79 - DNA, 39 bp, Saccharomyces cerevisiae; identical to SEQ ID NO: 8
  source 1..39: mol_type = other DNA; strain = YJM1133

SEQ ID NO: 80 - DNA, 39 bp, Saccharomyces cerevisiae; identical to SEQ ID NO: 9
  source 1..39: mol_type = other DNA; strain = YJM1133

SEQ ID NO: 81 - DNA, 39 bp, Saccharomyces cerevisiae; identical to SEQ ID NO: 10
  source 1..39: mol_type = other DNA; strain = YJM1190

SEQ ID NO: 82 - DNA, 39 bp, Saccharomyces cerevisiae; identical to SEQ ID NO: 9
  source 1..39: mol_type = other DNA; strain = YJM1190

SEQ ID NO: 83 - DNA, 39 bp, Saccharomyces cerevisiae; identical to SEQ ID NO: 8
  source 1..39: mol_type = other DNA; strain = YJM1199

SEQ ID NO: 84 - DNA, 39 bp, Saccharomyces cerevisiae; identical to SEQ ID NO: 9
  source 1..39: mol_type = other DNA; strain = YJM1199

SEQ ID NO: 85 - DNA, 39 bp, Saccharomyces cerevisiae; identical to SEQ ID NO: 8
  source 1..39: mol_type = other DNA; strain = YJM1202

SEQ ID NO: 86 - DNA, 39 bp, Saccharomyces cerevisiae; identical to SEQ ID NO: 9
  source 1..39: mol_type = other DNA; strain = YJM1202

SEQ ID NO: 87 - DNA, 39 bp, Saccharomyces cerevisiae; identical to SEQ ID NO: 10
  source 1..39: mol_type = other DNA; strain = YJM1208

SEQ ID NO: 88 - DNA, 39 bp, Saccharomyces cerevisiae; identical to SEQ ID NO: 9
  source 1..39: mol_type = other DNA; strain = YJM1208

SEQ ID NO: 89 - DNA, 39 bp, Saccharomyces cerevisiae; identical to SEQ ID NO: 8
  source 1..39: mol_type = other DNA; strain = YJM1244

SEQ ID NO: 90 - DNA, 39 bp, Saccharomyces cerevisiae; identical to SEQ ID NO: 9
  source 1..39: mol_type = other DNA; strain = YJM1244

SEQ ID NO: 91 - DNA, 39 bp, Saccharomyces cerevisiae; identical to SEQ ID NO: 10
  source 1..39: mol_type = other DNA; strain = YJM1248

SEQ ID NO: 92 - DNA, 39 bp, Saccharomyces cerevisiae; identical to SEQ ID NO: 9
  source 1..39: mol_type = other DNA; strain = YJM1248

SEQ ID NO: 93 - DNA, 39 bp, Saccharomyces cerevisiae; identical to SEQ ID NO: 8
  source 1..39: mol_type = other DNA; strain = YJM1250

SEQ ID NO: 94 - DNA, 39 bp, Saccharomyces cerevisiae; identical to SEQ ID NO: 9
  source 1..39: mol_type = other DNA; strain = YJM1250

SEQ ID NO: 95 - DNA, 39 bp, Saccharomyces cerevisiae; identical to SEQ ID NO: 10
  source 1..39: mol_type = other DNA; strain = YJM1252

SEQ ID NO: 96 - DNA, 39 bp, Saccharomyces cerevisiae; identical to SEQ ID NO: 9
  source 1..39: mol_type = other DNA; strain = YJM1252

SEQ ID NO: 97 - DNA, 39 bp, Saccharomyces cerevisiae; identical to SEQ ID NO: 8
  source 1..39: mol_type = other DNA; strain = YJM1415

SEQ ID NO: 98 - DNA, 39 bp, Saccharomyces cerevisiae; identical to SEQ ID NO: 9
  source 1..39: mol_type = other DNA; strain = YJM1415

SEQ ID NO: 99 - DNA, 39 bp, Saccharomyces cerevisiae; identical to SEQ ID NO: 8
  source 1..39: mol_type = other DNA; strain = YJM1417

SEQ ID NO: 100 - DNA, 39 bp, Saccharomyces cerevisiae; identical to SEQ ID NO: 9
  source 1..39: mol_type = other DNA; strain = YJM1417

SEQ ID NO: 101 - DNA, 39 bp, Saccharomyces cerevisiae
  source 1..39: mol_type = other DNA; strain = YJM1418
tggcactggctaaacttgagaccaggccaaccaatgtac

SEQ ID NO: 102 - DNA, 39 bp, Saccharomyces cerevisiae; identical to SEQ ID NO: 9
  source 1..39: mol_type = other DNA; strain = YJM1418

SEQ ID NO: 103 - DNA, 39 bp, Saccharomyces cerevisiae; identical to SEQ ID NO: 10
  source 1..39: mol_type = other DNA; strain = YJM1419

SEQ ID NO: 104 - DNA, 39 bp, Saccharomyces cerevisiae; identical to SEQ ID NO: 9
  source 1..39: mol_type = other DNA; strain = YJM1419

SEQ ID NO: 105 - DNA, 39 bp, Saccharomyces cerevisiae; identical to SEQ ID NO: 10
  source 1..39: mol_type = other DNA; strain = YJM1433

SEQ ID NO: 106 - DNA, 39 bp, Saccharomyces cerevisiae; identical to SEQ ID NO: 9
  source 1..39: mol_type = other DNA; strain = YJM1433

SEQ ID NO: 107 - DNA, 39 bp, Saccharomyces cerevisiae; identical to SEQ ID NO: 10
  source 1..39: mol_type = other DNA; strain = YJM1434

SEQ ID NO: 108 - DNA, 39 bp, Saccharomyces cerevisiae; identical to SEQ ID NO: 9
  source 1..39: mol_type = other DNA; strain = YJM1434

SEQ ID NO: 109 - DNA, 39 bp, Saccharomyces cerevisiae; identical to SEQ ID NO: 10
  source 1..39: mol_type = other DNA; strain = YJM1439

SEQ ID NO: 110 - DNA, 39 bp, Saccharomyces cerevisiae; identical to SEQ ID NO: 9
  source 1..39: mol_type = other DNA; strain = YJM1439

SEQ ID NO: 111 - DNA, 39 bp, Saccharomyces cerevisiae; identical to SEQ ID NO: 8
  source 1..39: mol_type = other DNA; strain = YJM1443

SEQ ID NO: 112 - DNA, 39 bp, Saccharomyces cerevisiae; identical to SEQ ID NO: 9
  source 1..39: mol_type = other DNA; strain = YJM1443

SEQ ID NO: 113 - DNA, 39 bp, Saccharomyces cerevisiae; identical to SEQ ID NO: 10
  source 1..39: mol_type = other DNA; strain = YJM1444

SEQ ID NO: 114 - DNA, 39 bp, Saccharomyces cerevisiae; identical to SEQ ID NO: 9
  source 1..39: mol_type = other DNA; strain = YJM1444

SEQ ID NO: 115 - DNA, 39 bp, Saccharomyces cerevisiae; identical to SEQ ID NO: 10
  source 1..39: mol_type = other DNA; strain = YJM1450

SEQ ID NO: 116 - DNA, 39 bp, Saccharomyces cerevisiae; identical to SEQ ID NO: 9
  source 1..39: mol_type = other DNA; strain = YJM1450

SEQ ID NO: 117 - DNA, 39 bp, Saccharomyces cerevisiae; identical to SEQ ID NO: 10
  source 1..39: mol_type = other DNA; strain = YJM1460

SEQ ID NO: 118 - DNA, 39 bp, Saccharomyces cerevisiae; identical to SEQ ID NO: 9
  source 1..39: mol_type = other DNA; strain = YJM1460

SEQ ID NO: 119 - DNA, 39 bp, Saccharomyces cerevisiae; identical to SEQ ID NO: 8
  source 1..39: mol_type = other DNA; strain = YJM1463

SEQ ID NO: 120 - DNA, 39 bp, Saccharomyces cerevisiae; identical to SEQ ID NO: 9
  source 1..39: mol_type = other DNA; strain = YJM1463

SEQ ID NO: 121 - DNA, 39 bp, Saccharomyces cerevisiae; identical to SEQ ID NO: 10
  source 1..39: mol_type = other DNA; strain = YJM1477

SEQ ID NO: 122 - DNA, 39 bp, Saccharomyces cerevisiae; identical to SEQ ID NO: 9
  source 1..39: mol_type = other DNA; strain = YJM1477

SEQ ID NO: 123 - DNA, 39 bp, Saccharomyces cerevisiae; identical to SEQ ID NO: 8
  source 1..39: mol_type = other DNA; strain = YJM1478

SEQ ID NO: 124 - DNA, 39 bp, Saccharomyces cerevisiae; identical to SEQ ID NO: 9
  source 1..39: mol_type = other DNA; strain = YJM1478

SEQ ID NO: 125 - DNA, 39 bp, Saccharomyces cerevisiae; identical to SEQ ID NO: 10
  source 1..39: mol_type = other DNA; strain = YJM1479

SEQ ID NO: 126 - DNA, 39 bp, Saccharomyces cerevisiae; identical to SEQ ID NO: 9
  source 1..39: mol_type = other DNA; strain = YJM1479

SEQ ID NO: 127 - DNA, 39 bp, Saccharomyces cerevisiae; identical to SEQ ID NO: 8
  source 1..39: mol_type = other DNA; strain = YJM1526

SEQ ID NO: 128 - DNA, 39 bp, Saccharomyces cerevisiae; identical to SEQ ID NO: 9
  source 1..39: mol_type = other DNA; strain = YJM1526

SEQ ID NO: 129 - DNA, 39 bp, Saccharomyces cerevisiae; identical to SEQ ID NO: 8
  source 1..39: mol_type = other DNA; strain = YJM1527

SEQ ID NO: 130 - DNA, 39 bp, Saccharomyces cerevisiae; identical to SEQ ID NO: 9
  source 1..39: mol_type = other DNA; strain = YJM1527

SEQ ID NO: 131 - DNA, 39 bp, Saccharomyces cerevisiae; identical to SEQ ID NO: 8
  source 1..39: mol_type = other DNA; strain = YJM1549

SEQ ID NO: 132 - DNA, 39 bp, Saccharomyces cerevisiae; identical to SEQ ID NO: 9
  source 1..39: mol_type = other DNA; strain = YJM1549

SEQ ID NO: 133 - DNA, 39 bp, Saccharomyces cerevisiae; identical to SEQ ID NO: 10
  source 1..39: mol_type = other DNA; strain = YJM1573

SEQ ID NO: 134 - DNA, 39 bp, Saccharomyces cerevisiae; identical to SEQ ID NO: 9
  source 1..39: mol_type = other DNA; strain = YJM1573

SEQ ID NO: 135 - DNA, 39 bp, Saccharomyces cerevisiae; identical to SEQ ID NO: 8
  source 1..39: mol_type = other DNA; strain = YJM1574

SEQ ID NO: 136 - DNA, 39 bp, Saccharomyces cerevisiae; identical to SEQ ID NO: 9
  source 1..39: mol_type = other DNA; strain = YJM1574

SEQ ID NO: 137 - DNA, 39 bp, Saccharomyces cerevisiae; identical to SEQ ID NO: 10
  source 1..39: mol_type = other DNA; strain = YJM1592

SEQ ID NO: 138 - DNA, 39 bp, Saccharomyces cerevisiae; identical to SEQ ID NO: 9
  source 1..39: mol_type = other DNA; strain = YJM1592

SEQ ID NO: 139 - DNA, 39 bp, Saccharomyces cerevisiae; identical to SEQ ID NO: 10
  source 1..39: mol_type = other DNA; strain = YJM1273

SEQ ID NO: 140 - DNA, 39 bp, Saccharomyces cerevisiae; identical to SEQ ID NO: 9
  source 1..39: mol_type = other DNA; strain = YJM1273

SEQ ID NO: 141 - DNA, 39 bp, Saccharomyces cerevisiae; identical to SEQ ID NO: 10
  source 1..39: mol_type = other DNA; strain = YJM1307

SEQ ID NO: 142 - DNA, 39 bp, Saccharomyces cerevisiae; identical to SEQ ID NO: 9
  source 1..39: mol_type = other DNA; strain = YJM1307

SEQ ID NO: 143 - DNA, 39 bp, Saccharomyces cerevisiae; identical to SEQ ID NO: 8
  source 1..39: mol_type = other DNA; strain = YJM1311

SEQ ID NO: 144 - DNA, 39 bp, Saccharomyces cerevisiae; identical to SEQ ID NO: 9
  source 1..39: mol_type = other DNA; strain = YJM1311

SEQ ID NO: 145 - DNA, 39 bp, Saccharomyces cerevisiae; identical to SEQ ID NO: 10
  source 1..39: mol_type = other DNA; strain = YJM1326

SEQ ID NO: 146 - DNA, 39 bp, Saccharomyces cerevisiae; identical to SEQ ID NO: 9
  source 1..39: mol_type = other DNA; strain = YJM1326

SEQ ID NO: 147 - DNA, 39 bp, Saccharomyces cerevisiae; identical to SEQ ID NO: 10
  source 1..39: mol_type = other DNA; strain = YJM1332

SEQ ID NO: 148 - DNA, 39 bp, Saccharomyces cerevisiae; identical to SEQ ID NO: 9
  source 1..39: mol_type = other DNA; strain = YJM1332

SEQ ID NO: 149 - DNA, 39 bp, Saccharomyces cerevisiae; identical to SEQ ID NO: 8
  source 1..39: mol_type = other DNA; strain = YJM1336

SEQ ID NO: 150 - DNA, 39 bp, Saccharomyces cerevisiae; identical to SEQ ID NO: 9
  source 1..39: mol_type = other DNA; strain = YJM1336

SEQ ID NO: 151 - DNA, 39 bp, Saccharomyces cerevisiae; identical to SEQ ID NO: 8
  source 1..39: mol_type = other DNA; strain = YJM1338

SEQ ID NO: 152 - DNA, 39 bp, Saccharomyces cerevisiae; identical to SEQ ID NO: 9
  source 1..39: mol_type = other DNA; strain = YJM1338

SEQ ID NO: 153 - DNA, 39 bp, Saccharomyces cerevisiae; identical to SEQ ID NO: 8
  source 1..39: mol_type = other DNA; strain = YJM1341

SEQ ID NO: 154 - DNA, 39 bp, Saccharomyces cerevisiae; identical to SEQ ID NO: 9
  source 1..39: mol_type = other DNA; strain = YJM1341

SEQ ID NO: 155 - DNA, 39 bp, Saccharomyces cerevisiae; identical to SEQ ID NO: 10
  source 1..39: mol_type = other DNA; strain = YJM1342

SEQ ID NO: 156 - DNA, 39 bp, Saccharomyces cerevisiae; identical to SEQ ID NO: 9
  source 1..39: mol_type = other DNA; strain = YJM1342

SEQ ID NO: 157 - DNA, 39 bp, Saccharomyces cerevisiae; identical to SEQ ID NO: 10
  source 1..39: mol_type = other DNA; strain = YJM1355

SEQ ID NO: 158 - DNA, 39 bp, Saccharomyces cerevisiae; identical to SEQ ID NO: 9
  source 1..39: mol_type = other DNA; strain = YJM1355

SEQ ID NO: 159 - DNA, 39 bp, Saccharomyces cerevisiae; identical to SEQ ID NO: 8
  source 1..39: mol_type = other DNA; strain = YJM1356

SEQ ID NO: 160 - DNA, 39 bp, Saccharomyces cerevisiae; identical to SEQ ID NO: 9
  source 1..39: mol_type = other DNA; strain = YJM1356

SEQ ID NO: 161 - DNA, 39 bp, Saccharomyces cerevisiae; identical to SEQ ID NO: 8
  source 1..39: mol_type = other DNA; strain = YJM1381

SEQ ID NO: 162 - DNA, 39 bp, Saccharomyces cerevisiae; identical to SEQ ID NO: 9
  source 1..39: mol_type = other DNA; strain = YJM1381

SEQ ID NO: 163 - DNA, 39 bp, Saccharomyces cerevisiae; identical to SEQ ID NO: 8
  source 1..39: mol_type = other DNA; strain = YJM1383

SEQ ID NO: 164 - DNA, 39 bp, Saccharomyces cerevisiae; identical to SEQ ID NO: 9
  source 1..39: mol_type = other DNA; strain = YJM1383

SEQ ID NO: 165 - DNA, 39 bp, Saccharomyces cerevisiae; identical to SEQ ID NO: 10
  source 1..39: mol_type = other DNA; strain = YJM1385

SEQ ID NO: 166 - DNA, 39 bp, Saccharomyces cerevisiae; identical to SEQ ID NO: 9
  source 1..39: mol_type = other DNA; strain = YJM1385

SEQ ID NO: 167 - DNA, 39 bp, Saccharomyces cerevisiae; identical to SEQ ID NO: 8
  source 1..39: mol_type = other DNA; strain = YJM1386

SEQ ID NO: 168 - DNA, 39 bp, Saccharomyces cerevisiae; identical to SEQ ID NO: 9
  source 1..39: mol_type = other DNA; strain = YJM1386

SEQ ID NO: 169 - DNA, 39 bp, Saccharomyces cerevisiae; identical to SEQ ID NO: 8
  source 1..39: mol_type = other DNA; strain = YJM1387

SEQ ID NO: 170 - DNA, 39 bp, Saccharomyces cerevisiae; identical to SEQ ID NO: 9
  source 1..39: mol_type = other DNA; strain = YJM1387

SEQ ID NO: 171 - DNA, 39 bp, Saccharomyces cerevisiae; identical to SEQ ID NO: 10
  source 1..39: mol_type = other DNA; strain = YJM1388

SEQ ID NO: 172 - DNA, 39 bp, Saccharomyces cerevisiae; identical to SEQ ID NO: 9
  source 1..39: mol_type = other DNA; strain = YJM1388

SEQ ID NO: 173 - DNA, 39 bp, Saccharomyces cerevisiae; identical to SEQ ID NO: 10
  source 1..39: mol_type = other DNA; strain = YJM1389

SEQ ID NO: 174 - DNA, 39 bp, Saccharomyces cerevisiae; identical to SEQ ID NO: 9
  source 1..39: mol_type = other DNA; strain = YJM1389

SEQ ID NO: 175 - DNA, 39 bp, Saccharomyces cerevisiae; identical to SEQ ID NO: 10
  source 1..39: mol_type = other DNA; strain = YJM1399

SEQ ID NO: 176 - DNA, 39 bp, Saccharomyces cerevisiae; identical to SEQ ID NO: 9
  source 1..39: mol_type = other DNA; strain = YJM1399

SEQ ID NO: 177 - DNA, 39 bp, Saccharomyces cerevisiae; identical to SEQ ID NO: 10
  source 1..39: mol_type = other DNA; strain = YJM1400

SEQ ID NO: 178 - DNA, 39 bp, Saccharomyces cerevisiae; identical to SEQ ID NO: 9
  source 1..39: mol_type = other DNA; strain = YJM1400

SEQ ID NO: 179 - DNA, 39 bp, Saccharomyces cerevisiae; identical to SEQ ID NO: 10
  source 1..39: mol_type = other DNA; strain = YJM1401

SEQ ID NO: 180 - DNA, 39 bp, Saccharomyces cerevisiae; identical to SEQ ID NO: 9
  source 1..39: mol_type = other DNA; strain = YJM1401

SEQ ID NO: 181 - DNA, 39 bp, Saccharomyces cerevisiae; identical to SEQ ID NO: 10
  source 1..39: mol_type = other DNA; strain = YJM1402

SEQ ID NO: 182 - DNA, 39 bp, Saccharomyces cerevisiae; identical to SEQ ID NO: 9
  source 1..39: mol_type = other DNA; strain = YJM1402

SEQ ID NO: 183 - DNA, 39 bp, Saccharomyces cerevisiae; identical to SEQ ID NO: 7
  source 1..39: mol_type = other DNA; strain = YJM1526

SEQ ID NO: 184 - DNA, 39 bp, Saccharomyces cerevisiae; identical to SEQ ID NO: 7
  source 1..39: mol_type = other DNA; strain = YJM1549

SEQ ID NO: 185 - DNA, 39 bp, Saccharomyces cerevisiae
  source 1..39: mol_type = other DNA; strain = YJM1574
tggcattggttgcaactaaaacctggccaaccaatgtac

SEQ ID NO: 186 - DNA, 39 bp, Saccharomyces cerevisiae; identical to SEQ ID NO: 7
  source 1..39: mol_type = other DNA; strain = YJM189

SEQ ID NO: 187 - DNA, 39 bp, Saccharomyces cerevisiae; identical to SEQ ID NO: 12
  source 1..39: mol_type = other DNA; strain = YJM969

SEQ ID NO: 188 - DNA, 39 bp, Saccharomyces cerevisiae; identical to SEQ ID NO: 12
  source 1..39: mol_type = other DNA; strain = YJM972

SEQ ID NO: 189 - DNA, 39 bp, Saccharomyces cerevisiae; identical to SEQ ID NO: 185
  source 1..39: mol_type = other DNA; strain = YJM978

SEQ ID NO: 190 - DNA, 39 bp, Saccharomyces cerevisiae; identical to SEQ ID NO: 185
  source 1..39: mol_type = other DNA; strain = YJM981

SEQ ID NO: 191 - DNA, 39 bp, Saccharomyces cerevisiae; identical to SEQ ID NO: 7
  source 1..39: mol_type = other DNA; strain = YJM987

SEQ ID NO: 192 - DNA, 39 bp, Saccharomyces cerevisiae; identical to SEQ ID NO: 7
  source 1..39: mol_type = other DNA; strain = YJM996

SEQ ID NO: 193 - DNA, 39 bp, Saccharomyces cerevisiae; identical to SEQ ID NO: 7
  source 1..39: mol_type = other DNA; strain = YJM1129

SEQ ID NO: 194 - DNA, 39 bp, Saccharomyces cerevisiae
  source 1..39: mol_type = other DNA; strain = YJM1460
tggcattggttgcaactaaagcctggccaaccaatgtac

SEQ ID NO: 195 - DNA, 39 bp, Saccharomyces cerevisiae; identical to SEQ ID NO: 7
  source 1..39: mol_type = other DNA; strain = YJM1463

SEQ ID NO: 196 - DNA, 39 bp, Saccharomyces cerevisiae; identical to SEQ ID NO: 7
  source 1..39: mol_type = other DNA; strain = YJM1477

SEQ ID NO: 197 - DNA, 39 bp, Saccharomyces cerevisiae; identical to SEQ ID NO: 7
  source 1..39: mol_type = other DNA; strain = YJM1478

SEQ ID NO: 198 - DNA, 39 bp, Saccharomyces cerevisiae; identical to SEQ ID NO: 194
  source 1..39: mol_type = other DNA; strain = YJM1479

SEQ ID NO: 199 - DNA, 39 bp, Saccharomyces cerevisiae; identical to SEQ ID NO: 194
  source 1..39: mol_type = other DNA; strain = YJM1527

SEQ ID NO: 200 - DNA, 39 bp, Saccharomyces cerevisiae; identical to SEQ ID NO: 194
  source 1..39: mol_type = other DNA; strain = YJM1573

SEQ ID NO: 201 - DNA, 39 bp, Saccharomyces cerevisiae; identical to SEQ ID NO: 12
  source 1..39: mol_type = other DNA; strain = YJM1592

SEQ ID NO: 202 - DNA, 39 bp, Saccharomyces cerevisiae
  source 1..39: mol_type = other DNA; strain = YJM1592
tggcattggttgcgactaaagcctggccaaccaatgtac

SEQ ID NO: 203 - DNA, 39 bp, Saccharomyces cerevisiae; identical to SEQ ID NO: 12
  source 1..39: mol_type = other DNA; strain = YJM1615

SEQ ID NO: 204 - DNA, 39 bp, Saccharomyces cerevisiae; identical to SEQ ID NO: 185
  source 1..39: mol_type = other DNA; strain = YJM193

SEQ ID NO: 205 - DNA, 39 bp, Saccharomyces cerevisiae; identical to SEQ ID NO: 194
  source 1..39: mol_type = other DNA; strain = YJM195

SEQ ID NO: 206 - DNA, 39 bp, Saccharomyces cerevisiae; identical to SEQ ID NO: 185
  source 1..39: mol_type = other DNA; strain = YJM244

SEQ ID NO: 207 - DNA, 39 bp, Saccharomyces cerevisiae; identical to SEQ ID NO: 7
  source 1..39: mol_type = other DNA; strain = YJM248

SEQ ID NO: 208 - DNA, 39 bp, Saccharomyces cerevisiae; identical to SEQ ID NO: 12
  source 1..39: mol_type = other DNA; strain = YJM270

SEQ ID NO: 209 - DNA, 39 bp, Saccharomyces cerevisiae; identical to SEQ ID NO: 7
  source 1..39: mol_type = other DNA; strain = YJM271

SEQ ID NO: 210 - DNA, 39 bp, Saccharomyces cerevisiae; identical to SEQ ID NO: 194
  source 1..39: mol_type = other DNA; strain = YJM320

SEQ ID NO: 211 - DNA, 39 bp, Saccharomyces cerevisiae; identical to SEQ ID NO: 194
  source 1..39: mol_type = other DNA; strain = YJM326

SEQ ID NO: 212 - DNA, 39 bp, Saccharomyces cerevisiae; identical to SEQ ID NO: 7
  source 1..39: mol_type = other DNA; strain = YJM428

SEQ ID NO: 213 - DNA, 39 bp, Saccharomyces cerevisiae
  source 1..39: mol_type = other DNA; strain = YJM450
tggcattggttgcagttaaaacccggtcaaccaatgtac

SEQ ID NO: 214 - DNA, 39 bp, Saccharomyces cerevisiae; identical to SEQ ID NO: 7
  source 1..39: mol_type = other DNA; strain = YJM1356

SEQ ID NO: 215 - DNA, 39 bp, Saccharomyces cerevisiae; identical to SEQ ID NO: 185
  source 1..39: mol_type = other DNA; strain = YJM1381

SEQ ID NO: 216 - DNA, 39 bp, Saccharomyces cerevisiae; identical to SEQ ID NO: 185
  source 1..39: mol_type = other DNA; strain = YJM1383

SEQ ID NO: 217 - DNA, 39 bp, Saccharomyces cerevisiae; identical to SEQ ID NO: 12
  source 1..39: mol_type = other DNA; strain = YJM1385

SEQ ID NO: 218 - DNA, 39 bp, Saccharomyces cerevisiae; identical to SEQ ID NO: 7
  source 1..39: mol_type = other DNA; strain = YJM1386

SEQ ID NO: 219 - DNA, 39 bp, Saccharomyces cerevisiae; identical to SEQ ID NO: 7
  source 1..39: mol_type = other DNA; strain = YJM1387

SEQ ID NO: 220 - DNA, 39 bp, Saccharomyces cerevisiae; identical to SEQ ID NO: 185
  source 1..39: mol_type = other DNA; strain = YJM1388

SEQ ID NO: 221 - DNA, 39 bp, Saccharomyces cerevisiae; identical to SEQ ID NO: 7
  source 1..39: mol_type = other DNA; strain = YJM1389

SEQ ID NO: 222 - DNA, 39 bp, Saccharomyces cerevisiae; identical to SEQ ID NO: 202
  source 1..39: mol_type = other DNA; strain = YJM1389

SEQ ID NO: 223 - DNA, 39 bp, Saccharomyces cerevisiae; identical to SEQ ID NO: 185
  source 1..39: mol_type = other DNA; strain = YJM1399

SEQ ID NO: 224 - DNA, 39 bp, Saccharomyces cerevisiae; identical to SEQ ID NO: 7
  source 1..39: mol_type = other DNA; strain = YJM1400

SEQ ID NO: 225 - DNA, 39 bp, Saccharomyces cerevisiae; identical to SEQ ID NO: 12
  source 1..39: mol_type = other DNA; strain = YJM1401

SEQ ID NO: 226 - DNA, 39 bp, Saccharomyces cerevisiae; identical to SEQ ID NO: 185
  source 1..39: mol_type = other DNA; strain = YJM1402

SEQ ID NO: 227 - DNA, 39 bp, Saccharomyces cerevisiae; identical to SEQ ID NO: 185
  source 1..39: mol_type = other DNA; strain = YJM1415

SEQ ID NO: 228 - DNA, 39 bp, Saccharomyces cerevisiae; identical to SEQ ID NO: 12
  source 1..39: mol_type = other DNA; strain = YJM1417

SEQ ID NO: 229 - DNA, 39 bp, Saccharomyces cerevisiae; identical to SEQ ID NO: 194
  source 1..39: mol_type = other DNA; strain = YJM1418

SEQ ID NO: 230 - DNA, 39 bp, Saccharomyces cerevisiae; identical to SEQ ID NO: 194
  source 1..39: mol_type = other DNA; strain = YJM1419

SEQ ID NO: 231 - DNA, 39 bp, Saccharomyces cerevisiae; identical to SEQ ID NO: 185
  source 1..39: mol_type = other DNA; strain = YJM1433

SEQ ID NO: 232 - DNA, 39 bp, Saccharomyces cerevisiae; identical to SEQ ID NO: 185
  source 1..39: mol_type = other DNA; strain = YJM1434

SEQ ID NO: 233 - DNA, 39 bp, Saccharomyces cerevisiae; identical to SEQ ID NO: 194
  source 1..39: mol_type = other DNA; strain = YJM1439

SEQ ID NO: 234 - DNA, 39 bp, Saccharomyces cerevisiae; identical to SEQ ID NO: 194
  source 1..39: mol_type = other DNA; strain = YJM1443

SEQ ID NO: 235 - DNA, 39 bp, Saccharomyces cerevisiae; identical to SEQ ID NO: 185
  source 1..39: mol_type = other DNA; strain = YJM1444

SEQ ID NO: 236 - DNA, 39 bp, Saccharomyces cerevisiae; identical to SEQ ID NO: 194
  source 1..39: mol_type = other DNA; strain = YJM1447

SEQ ID NO: 237 - DNA, 39 bp, Saccharomyces cerevisiae; identical to SEQ ID NO: 12
  source 1..39: mol_type = other DNA; strain = YJM1450

SEQ ID NO: 238 - DNA, 39 bp, Saccharomyces cerevisiae; identical to SEQ ID NO: 12
  source 1..39: mol_type = other DNA; strain = YJM1083

SEQ ID NO: 239 - DNA, 39 bp, Saccharomyces cerevisiae; identical to SEQ ID NO: 185
  source 1..39: mol_type = other DNA; strain = YJM1133

SEQ ID NO: 240 - DNA, 39 bp, Saccharomyces cerevisiae; identical to SEQ ID NO: 12
  source 1..39: mol_type = other DNA; strain = YJM1190

SEQ ID NO: 241 - DNA, 39 bp, Saccharomyces cerevisiae; identical to SEQ ID NO: 12
  source 1..39: mol_type = other DNA; strain = YJM1199

SEQ ID NO: 242 - DNA, 39 bp, Saccharomyces cerevisiae; identical to SEQ ID NO: 194
  source 1..39: mol_type = other DNA; strain = YJM1202

SEQ ID NO: 243 - DNA, 39 bp, Saccharomyces cerevisiae; identical to SEQ ID NO: 185
  source 1..39: mol_type = other DNA; strain = YJM1208

SEQ ID NO: 244 - DNA, 39 bp, Saccharomyces cerevisiae; identical to SEQ ID NO: 7
  source 1..39: mol_type = other DNA; strain = YJM1242

SEQ ID NO: 245 - DNA, 39 bp, Saccharomyces cerevisiae; identical to SEQ ID NO: 7
  source 1..39: mol_type = other DNA; strain = YJM1244

SEQ ID NO: 246 - DNA, 39 bp, Saccharomyces cerevisiae; identical to SEQ ID NO: 194
  source 1..39: mol_type = other DNA; strain = YJM1248

SEQ ID NO: 247 - DNA, 39 bp, Saccharomyces cerevisiae; identical to SEQ ID NO: 7
  source 1..39: mol_type = other DNA; strain = YJM1250

SEQ ID NO: 248 - DNA, 39 bp, Saccharomyces cerevisiae; identical to SEQ ID NO: 12
  source 1..39: mol_type = other DNA; strain = YJM1252

SEQ ID NO: 249 - DNA, 39 bp, Saccharomyces cerevisiae; identical to SEQ ID NO: 12
  source 1..39: mol_type = other DNA; strain = YJM1273

SEQ ID NO: 250 - DNA, 39 bp, Saccharomyces cerevisiae; identical to SEQ ID NO: 7
  source 1..39: mol_type = other DNA; strain = YJM1304

SEQ ID NO: 251 - DNA, 39 bp, Saccharomyces cerevisiae; identical to SEQ ID NO: 7
  source 1..39: mol_type = other DNA; strain = YJM1307

SEQ ID NO: 252 - DNA, 39 bp, Saccharomyces cerevisiae; identical to SEQ ID NO: 12
  source 1..39: mol_type = other DNA; strain = YJM1311

SEQ ID NO: 253 - DNA, 39 bp, Saccharomyces cerevisiae; identical to SEQ ID NO: 12
  source 1..39: mol_type = other DNA; strain = YJM1326

SEQ ID NO: 254 - DNA, 39 bp, Saccharomyces cerevisiae; identical to SEQ ID NO: 185
  source 1..39: mol_type = other DNA; strain = YJM1332

SEQ ID NO: 255 - DNA, 39 bp, Saccharomyces cerevisiae; identical to SEQ ID NO: 12
  source 1..39: mol_type = other DNA; strain = YJM1336

SEQ ID NO: 256 - DNA, 39 bp, Saccharomyces cerevisiae; identical to SEQ ID NO: 7
  source 1..39: mol_type = other DNA; strain = YJM1338

SEQ ID NO: 257 - DNA, 39 bp, Saccharomyces cerevisiae; identical to SEQ ID NO: 7
  source 1..39: mol_type = other DNA; strain = YJM1341

SEQ ID NO: 258 - DNA, 39 bp, Saccharomyces cerevisiae; identical to SEQ ID NO: 185
  source 1..39: mol_type = other DNA; strain = YJM1342

SEQ ID NO: 259 - DNA, 39 bp, Saccharomyces cerevisiae; identical to SEQ ID NO: 194
  source 1..39: mol_type = other DNA; strain = YJM1355

SEQ ID NO: 260 - DNA, 39 bp, Saccharomyces cerevisiae; identical to SEQ ID NO: 7
  source 1..39: mol_type = other DNA; strain = YJM451

SEQ ID NO: 261 - DNA, 39 bp, Saccharomyces cerevisiae; identical to SEQ ID NO: 12
  source 1..39: mol_type = other DNA; strain = YJM453

SEQ ID NO: 262 - DNA, 39 bp, Saccharomyces cerevisiae; identical to SEQ ID NO: 185
  source 1..39: mol_type = other DNA; strain = YJM456

SEQ ID NO: 263 - DNA, 39 bp, Saccharomyces cerevisiae; identical to SEQ ID NO: 12
  source 1..39: mol_type = other DNA; strain = YJM470

SEQ ID NO: 264 - DNA, 39 bp, Saccharomyces cerevisiae; identical to SEQ ID NO: 194
  source 1..39: mol_type = other DNA; strain = YJM541

SEQ ID NO: 265 - DNA, 39 bp, Saccharomyces cerevisiae; identical to SEQ ID NO: 194
  source 1..39: mol_type = other DNA; strain = YJM554

SEQ ID NO: 266 - DNA, 39 bp, Saccharomyces cerevisiae; identical to SEQ ID NO: 194
  source 1..39: mol_type = other DNA; strain = YJM555

SEQ ID NO: 267 - DNA, 39 bp, Saccharomyces cerevisiae; identical to SEQ ID NO: 194
  source 1..39: mol_type = other DNA; strain = YJM627

SEQ ID NO: 268 - DNA, 39 bp, Saccharomyces cerevisiae; identical to SEQ ID NO: 7
  source 1..39: mol_type = other DNA; strain = YJM681

SEQ ID NO: 269 - DNA, 39 bp, Saccharomyces cerevisiae; identical to SEQ ID NO: 12
  source 1..39: mol_type = other DNA; strain = YJM682

SEQ ID NO: 270 - DNA, 39 bp, Saccharomyces cerevisiae; identical to SEQ ID NO: 194
  source 1..39: mol_type = other DNA; strain = YJM683

SEQ ID NO: 271 - DNA, 39 bp, Saccharomyces cerevisiae; identical to SEQ ID NO: 7
  source 1..39: mol_type = other DNA; strain = YJM689

SEQ ID NO: 272 - DNA, 39 bp, Saccharomyces cerevisiae; identical to SEQ ID NO: 7
  source 1..39: mol_type = other DNA; strain = YJM693

SEQ ID NO: 273 - DNA, 39 bp, Saccharomyces cerevisiae; identical to SEQ ID NO: 12
  source 1..39: mol_type = other DNA; strain = YJM975

SEQ ID NO: 274 - DNA, 39 bp, Saccharomyces cerevisiae; identical to SEQ ID NO: 12
  source 1..39: mol_type = other DNA; strain = YJM984

SEQ ID NO: 275 - DNA, 39 bp, Saccharomyces cerevisiae; identical to SEQ ID NO: 7
  source 1..39: mol_type = other DNA; strain = YJM990

SEQ ID NO: 276 - DNA, 39 bp, Saccharomyces cerevisiae; identical to SEQ ID NO: 10
  source 1..39: mol_type = other DNA; strain = YJM1304

SEQ ID NO: 277 - DNA, 39 bp, Saccharomyces cerevisiae; identical to SEQ ID NO: 9
  source 1..39: mol_type = other DNA; strain = YJM1304

SEQ ID NO: 278 - DNA, 30 bp, Sclerotinia sclerotiorum
  source 1..30: mol_type = other DNA; strain = 1980 UF-70
tggtgcggaagacccggtcaaccatgcaag

SEQ ID NO: 279 - DNA, 27 bp, Sclerotinia sclerotiorum
  source 1..27: mol_type = other DNA; strain = 1980 UF-70
tggtgcggtcgtcccggtcaaccttgt

SEQ ID NO: 280 - DNA, 30 bp, Cordyceps militaris
  source 1..30: mol_type = other DNA
tggtgcacgagacccggccagccgtgctgg

SEQ ID NO: 281 - DNA, 30 bp, Cordyceps militaris
  source 1..30: mol_type = other DNA
tggtgcacgagacctggcgagccttgctgg

SEQ ID NO: 282 - DNA, 30 bp, Cordyceps militaris
  source 1..30: mol_type = other DNA
tggtgcctgagacctggccagccttgctgg

SEQ ID NO: 283 - DNA, 30 bp, Botrytis cinerea
  source 1..30: mol_type = other DNA; strain = B05.10
tggtgcggacgccccggacagccatgcaag

SEQ ID NO: 284 - DNA, 27 bp, Botrytis cinerea
  source 1..27: mol_type = other DNA; strain = B05.10
tggtgcggacgtcccggacaaccttgc

SEQ ID NO: 285 - DNA, 39 bp, Kluyveromyces marxianus
  source 1..39: mol_type = other DNA; strain = DMKU3-1042
tggaaatggctatcatttagagtagggcaaccaatttat

SEQ ID NO: 286 - DNA, 36 bp, Kluyveromyces marxianus
  source 1..36: mol_type = other DNA; strain = DMKU3-1042
tggaaatggctatcatttagagtagggcaaccaatt

SEQ ID NO: 287 - DNA, 39 bp, Kluyveromyces marxianus
  source 1..39: mol_type = other DNA; strain = DMKU3-1042
tggaagtggttatctttcagaattggacaaccaatctac

SEQ ID NO: 288 - DNA, 36 bp, Kluyveromyces marxianus
  source 1..36: mol_type = other DNA; strain = DMKU3-1042
tggaagtggttatctttcagaattggacaaccaatc

SEQ ID NO: 289 - DNA, 39 bp, Kluyveromyces marxianus
  source 1..39: mol_type = other DNA; strain = DMKU3-1042
tggaagtggttatctttgagggttgggcaaccaatttac

SEQ ID NO: 290 - DNA, 36 bp, Kluyveromyces marxianus
  source 1..36: mol_type = other DNA; strain = DMKU3-1042
tggaagtggttatctttgagggttgggcaaccaatt

SEQ ID NO: 291 - DNA, 33 bp, Kluyveromyces marxianus
  source 1..33: mol_type = other DNA; strain = DMKU3-1042
tggctatcatttagagtagggcaaccaatttat

SEQ ID NO: 292 - DNA, 39 bp, Kluyveromyces marxianus
  source 1..39: mol_type = other DNA; strain = DMKU3-1042
tgggaatggctatctttgagggtaggacaaccactttac

SEQ ID NO: 293 - DNA, 33 bp, Kluyveromyces marxianus
  source 1..33: mol_type = other DNA; strain = DMKU3-1042
tgggaatggctatctttgagggtaggacaacca

SEQ ID NO: 294 - DNA, 33 bp, Kluyveromyces marxianus
  source 1..33: mol_type = other DNA; strain = DMKU3-1042
tggttatctttcagaattggacaaccaatctac

SEQ ID NO: 295 - DNA, 33 bp, Kluyveromyces marxianus
  source 1..33: mol_type = other DNA; strain = DMKU3-1042
tggttatctttgagggttgggcaaccaatttac

SEQ ID NO: 296 - DNA, 39 bp, Kluyveromyces marxianus; identical to SEQ ID NO: 285
  source 1..39: mol_type = other DNA

SEQ ID NO: 297 - DNA, 36 bp, Kluyveromyces marxianus; identical to SEQ ID NO: 286
  source 1..36: mol_type = other DNA

SEQ ID NO: 298 - DNA, 39 bp, Kluyveromyces marxianus; identical to SEQ ID NO: 287
  source 1..39: mol_type = other DNA

SEQ ID NO: 299 - DNA, 36 bp, Kluyveromyces marxianus; identical to SEQ ID NO: 288
  source 1..36: mol_type = other DNA

SEQ ID NO: 300 - DNA, 39 bp, Kluyveromyces marxianus; identical to SEQ ID NO: 289
  source 1..39: mol_type = other DNA

SEQ ID NO: 301 - DNA, 36 bp, Kluyveromyces marxianus; identical to SEQ ID NO: 290
  source 1..36: mol_type = other DNA

SEQ ID NO: 302 - DNA, 33 bp, Kluyveromyces marxianus; identical to SEQ ID NO: 291
  source 1..33: mol_type = other DNA

SEQ ID NO: 303 - DNA, 39 bp, Kluyveromyces marxianus; identical to SEQ ID NO: 292
  source 1..39: mol_type = other DNA

SEQ ID NO: 304 - DNA, 33 bp, Kluyveromyces marxianus; identical to SEQ ID NO: 293
  source 1..33: mol_type = other DNA

SEQ ID NO: 305 - DNA, 33 bp, Kluyveromyces marxianus; identical to SEQ ID NO: 294
  source 1..33: mol_type = other DNA

SEQ ID NO: 306 - DNA, 33 bp, Kluyveromyces marxianus; identical to SEQ ID NO: 295
  source 1..33: mol_type = other DNA

SEQ ID NO: 307 - DNA, 39 bp, Saccharomyces cerevisiae
  source 1..39: mol_type = other DNA
tggcactggttaaacttgagaccaggccaaccaatgtat

SEQ ID NO: 308 - DNA, 39 bp, Saccharomyces cerevisiae; identical to SEQ ID NO: 9
  source 1..39: mol_type = other DNA

SEQ ID NO: 309 - DNA, 39 bp, Saccharomyces cerevisiae; identical to SEQ ID NO: 194
  source 1..39: mol_type = other DNA

SEQ ID NO: 310 - DNA, 39 bp, Saccharomyces cerevisiae; identical to SEQ ID NO: 101
  source 1..39: mol_type = other DNA

SEQ ID NO: 311 - DNA, 39 bp, Saccharomyces cerevisiae; identical to SEQ ID NO: 9
  source 1..39: mol_type = other DNA

SEQ ID NO: 312 - DNA, 39 bp, Saccharomyces cerevisiae; identical to SEQ ID NO: 10
  source 1..39: mol_type = other DNA

SEQ ID NO: 313 - DNA, 39 bp, Saccharomyces cerevisiae; identical to SEQ ID NO: 9
  source 1..39: mol_type = other DNA

SEQ ID NO: 314 - DNA, 39 bp, Saccharomyces cerevisiae; identical to SEQ ID NO: 10
  source 1..39: mol_type = other DNA

SEQ ID NO: 315 - DNA, 39 bp, Saccharomyces cerevisiae; identical to SEQ ID NO: 9
  source 1..39: mol_type = other DNA

SEQ ID NO: 316 - DNA, 39 bp, Saccharomyces cerevisiae; identical to SEQ ID NO: 12
  source 1..39: mol_type = other DNA

SEQ ID NO: 317 - DNA, 39 bp, Saccharomyces cerevisiae; identical to SEQ ID NO: 194
  source 1..39: mol_type = other DNA

SEQ ID NO: 318 - DNA, 39 bp, Saccharomyces cerevisiae; identical to SEQ ID NO: 7
  source 1..39: mol_type = other DNA

SEQ ID NO: 319 - DNA, 39 bp, Saccharomyces cerevisiae
  source 1..39: mol_type = other DNA
tggcactggttaaacctgagaccaggccaaccaatgtac

SEQ ID NO: 320 - DNA, 39 bp, Saccharomyces cerevisiae; identical to SEQ ID NO: 9
  source 1..39: mol_type = other DNA

SEQ ID NO: 321 - DNA, 39 bp, Saccharomyces cerevisiae; identical to SEQ ID NO: 319
  source 1..39: mol_type = other DNA

SEQ ID NO: 322 - DNA, 39 bp, Saccharomyces cerevisiae; identical to SEQ ID NO: 9
  source 1..39: mol_type = other DNA

SEQ ID NO: 323 - DNA, 39 bp, Saccharomyces cerevisiae; identical to SEQ ID NO: 319
  source 1..39: mol_type = other DNA

SEQ ID NO: 324 - DNA, 39 bp, Saccharomyces cerevisiae; identical to SEQ ID NO: 9
  source 1..39: mol_type = other DNA

SEQ ID NO: 325 - DNA, 39 bp, Saccharomyces cerevisiae; identical to SEQ ID NO: 10
  source 1..39: mol_type = other DNA

SEQ ID NO: 326 - DNA, 39 bp, Saccharomyces cerevisiae; identical to SEQ ID NO: 9
  source 1..39: mol_type = other DNA

SEQ ID NO: 327 - DNA, 39 bp, Saccharomyces cerevisiae; identical to SEQ ID NO: 7
  source 1..39: mol_type = other DNA

SEQ ID NO: 328 - DNA, 39 bp, Saccharomyces cerevisiae
  source 1..39: mol_type = other DNA
tggcattggttgcagttgaaacccggtcaaccaatgtac

SEQ ID NO: 329 - DNA, 39 bp, Saccharomyces cerevisiae; identical to SEQ ID NO: 194
  source 1..39: mol_type = other DNA

SEQ ID NO: 330 - DNA, 39 bp, Saccharomyces cerevisiae; identical to SEQ ID NO: 328
  source 1..39: mol_type = other DNA

SEQ ID NO: 331 - DNA, 36 bp, Kluyveromyces lactis
  source 1..36: mol_type = other DNA
tggagctggattactctaagacctggtcaaccgatc

SEQ ID NO: 332 - DNA, 30 bp, Zygosaccharomyces rouxii
  source 1..30: mol_type = other DNA
cactttgtggaattagaccctggtcaacca

SEQ ID NO: 333 - DNA, 30 bp, Zygosaccharomyces rouxii
  source 1..30: mol_type = other DNA
catttcattgagttagacccaggtcaaccc

SEQ ID NO: 334 - DNA, 39 bp, Lachancea thermotolerans
  source 1..39: mol_type = other DNA; strain = CBS 6340
tggcgctggctaagtctggctagaggccagccaatgtat

SEQ ID NO: 335 - DNA, 39 bp, Lachancea thermotolerans
  source 1..39: mol_type = other DNA; strain = CBS 6340
tggcgctggttgagcttgtctagagggcagccaatgtac

SEQ ID NO: 336 - DNA, 39 bp, Saccharomyces cerevisiae; identical to SEQ ID NO: 8
  source 1..39: mol_type = other DNA; strain = EC1118

SEQ ID NO: 337 - DNA, 39 bp, Saccharomyces cerevisiae; identical to SEQ ID NO: 9
  source 1..39: mol_type = other DNA; strain = EC1118

SEQ ID NO: 338 - DNA, 39 bp, Saccharomyces cerevisiae; identical to SEQ ID NO: 7
  source 1..39: mol_type = other DNA; strain = EC1118

SEQ ID NO: 339 - DNA, 39 bp, Naumovozyma castellii
  source 1..39: mol_type = other DNA; strain = CBS 4309
tggcactggttgagattggacccaggtcaaccattgtac

SEQ ID NO: 340 - DNA, 39 bp, Naumovozyma castellii
  source 1..39: mol_type = other DNA; strain = CBS 4309
tggcactggttgagattggacccaggtcaaccattatac

SEQ ID NO: 341 - DNA, 39 bp, Naumovozyma dairenensis
  source 1..39: mol_type = other DNA; strain = CBS 421
tggcattggttgagactagacccaggtcaaccattatac

SEQ ID NO: 342 - DNA, 39 bp, Naumovozyma dairenensis
  source 1..39: mol_type = other DNA; strain = CBS 421
tggcattggctaaggttagatccaggccaaccattatat

SEQ ID NO: 343 - DNA, 39 bp, Naumovozyma dairenensis
  source 1..39: mol_type = other DNA; strain = CBS 421
tggcattggttgagattggatgcaggtcaaccattatat

SEQ ID NO: 344 - DNA, 30 bp, Botrytis cinerea
  source 1..30: mol_type = other DNA; strain = T4
tggtgcggacgcccaggacaaccatgcaag

SEQ ID NO: 345 - DNA, 27 bp, Botrytis cinerea
  source 1..27: mol_type = other DNA; strain = T4
tggtgcggacgtccaggacaaccttgc

SEQ ID NO: 346 - DNA, 30 bp, Claviceps purpurea
  source 1..30: mol_type = other DNA; strain = 20.1
tggtgctggcgccctggccagggatgctgg

SEQ ID NO: 347 - DNA, 30 bp, Claviceps purpurea
  source 1..30: mol_type = other DNA; strain = 20.1
tggtgctggcgccctggtgaaggttgctgg

SEQ ID NO: 348 - DNA, 39 bp, Tetrapisispora phaffii
  source 1..39: mol_type = other DNA; strain = CBS 4417
tggcactggttaagattagaccctggtcaaccattatac

SEQ ID NO: 349 - DNA, 39 bp, Kazachstania africana
  source 1..39: mol_type = other DNA; strain = CBS 2517
tggcactggttaagcattgcaccaggccaaccaatgtac

SEQ ID NO: 350 - DNA, 39 bp, Kazachstania africana
  source 1..39: mol_type = other DNA; strain = CBS 2517
tggcactggttgagcatctctcctggtcaacctatgtac

SEQ ID NO: 351 - DNA, 39 bp, Kazachstania africana
  source 1..39: mol_type = other DNA; strain = CBS 2517
tggcactggttaagcatttctccaggtcaaccaatgtac

SEQ ID NO: 352 - DNA, 30 bp, Tetrapisispora blattae
  source 1..30: mol_type = other DNA; strain = CBS 6284
cactggttgagattgggtcgtggtgagcca

SEQ ID NO: 353 - DNA, 36 bp, Tetrapisispora blattae
  source 1..36: mol_type = other DNA; strain = CBS 6284
cattggttaagattaggtcgtggtgaaccattatac

SEQ ID NO: 354 - DNA, 39 bp, Kazachstania naganishii
  source 1..39: mol_type = other DNA; strain = CBS 8797
tggcactggttgaggttgtcctacggtcagcctatctac

SEQ ID NO: 355 - DNA, 36 bp, Kazachstania naganishii
  source 1..36: mol_type = other DNA; strain = CBS 8797
tggcattggttgagattgtcctacggccaacctatc

SEQ ID NO: 356 - DNA, 33 bp, Kazachstania naganishii
  source 1..33: mol_type = other DNA; strain = CBS 8797
tggcattggttgagattgtcctacggccaacct

SEQ ID NO: 357 - DNA, 30 bp, Fusarium fujikuroi
  source 1..30: mol_type = other DNA; strain = IMI 58289
tggtgcacttggcgaggccagccatgctgg

SEQ ID NO: 358 - DNA, 30 bp, Fusarium fujikuroi
  source 1..30: mol_type = other DNA; strain = IMI 58289
tggtgcatgtggcgtggacaaccttgttgg

SEQ ID NO: 359 - DNA, 36 bp, Kluyveromyces dobzhanskii
  source 1..36: mol_type = other DNA; strain = CBS 2104
tggagctggatctcccttagacctggtcaacctatt

SEQ ID NO: 360 - DNA, 36 bp, Kluyveromyces dobzhanskii
  source 1..36: mol_type = other DNA; strain = CBS 2104
tggagttggatctctttgagacgtggtcagccaatt

SEQ ID NO: 361 - DNA, 30 bp, Fusarium graminearum
  source 1..30: mol_type = other DNA
tggtgcacctggaaaggccagccttgctgg

SEQ ID NO: 362 - DNA, 30 bp, Fusarium graminearum
  source 1..30: mol_type = other DNA
tggtgctggtggaagggccaaccttgctgg

SEQ ID NO: 363 - DNA, 30 bp, Fusarium venenatum
  source 1..30: mol_type = other DNA
tggtgcacctggaagggacagccttgctgg

SEQ ID NO: 364 - DNA, 30 bp, Fusarium venenatum
  source 1..30: mol_type = other DNA
tggtgctggtggaagggacaaccttgctgg

SEQ ID NO: 365 - DNA, 39 bp, Lachancea lanzarotensis
  source 1..39: mol_type = other DNA
tggaggtggttgagtctggccagaggtcaaccaatgtac

SEQ ID NO: 366 - DNA, 30 bp, Verticillium longisporum
  source 1..30: mol_type = other DNA
ccctgcccccgacctggacagggctgctgg

SEQ ID NO: 367 - DNA, 30 bp, Verticillium longisporum; identical to SEQ ID NO: 366
  source 1..30: mol_type = other DNA

SEQ ID NO: 368 - DNA, 30 bp, Verticillium longisporum; identical to SEQ ID NO: 366
  source 1..30: mol_type = other DNA

SEQ ID NO: 369 - DNA, 39 bp, Lachancea quebecensis
  source 1..39: mol_type = other DNA
tggcgctggttgagcttgtctagaggacagccaatgtac

SEQ ID NO: 370 - DNA, 39 bp, Lachancea quebecensis
  source 1..39: mol_type = other DNA
tggcgctggttgaggttgtctagaggacagccaatgtac

SEQ ID NO: 371 - DNA, 33 bp, Lachancea quebecensis
  source 1..33: mol_type = other DNA
tggttgagcttgtctagaggacagccaatgtac

SEQ ID NO: 372 - DNA, 33 bp, Lachancea quebecensis
  source 1..33: mol_type = other DNA
tggttgaggttgtctagaggacagccaatgtac

SEQ ID NO: 373 - DNA, 30 bp, Fusarium proliferatum
  source 1..30: mol_type = other DNA
tggtgcatgtggcgtggacaaccttgctgg

SEQ ID NO: 374 - DNA, 30 bp, Fusarium proliferatum
  source 1..30: mol_type = other DNA
tggtgtacctggaggggccaaccctgctgg

SEQ ID NO: 375 - DNA, 30 bp, Fusarium mangiferae
  source 1..30: mol_type = other DNA
tggtgcacttggcgaggccaaccatgctgg

SEQ ID NO: 376 - DNA, 30 bp, Fusarium mangiferae
  source 1..30: mol_type = other DNA
tggtgcatgtggcgaggccagccttgctgg

SEQ ID NO: 377 - DNA, 30 bp, Fusarium proliferatum
  source 1..30: mol_type = other DNA; strain = ET1
tggtgcacctggcgcggacaaccttgctgg

SEQ ID NO: 378 - DNA, 30 bp, Fusarium proliferatum
  source 1..30: mol_type = other DNA; strain = ET1
tggtgtatgtggcgaggtcagccatgctgg

SEQ ID NO: 379 - DNA, 39 bp, Saccharomyces cerevisiae; identical to SEQ ID NO: 8
  source 1..39: mol_type = other DNA; strain = S288C

SEQ ID NO: 380 - DNA, 39 bp, Saccharomyces cerevisiae; identical to SEQ ID NO: 9
  source 1..39: mol_type = other DNA; strain = S288C

SEQ ID NO: 381 - DNA, 39 bp, Saccharomyces cerevisiae; identical to SEQ ID NO: 7
  source 1..39: mol_type = other DNA; strain = S288C

SEQ ID NO: 382 - DNA, 39 bp, Saccharomyces cerevisiae; identical to SEQ ID NO: 12
  source 1..39: mol_type = other DNA; strain = YJM789

SEQ ID NO: 383 - DNA, 39 bp, Saccharomyces cerevisiae; identical to SEQ ID NO: 8
  source 1..39: mol_type = other DNA; strain = YJM789

SEQ ID NO: 384 - DNA, 39 bp, Saccharomyces cerevisiae; identical to SEQ ID NO: 9
  source 1..39: mol_type = other DNA; strain = YJM789

SEQ ID NO: 385 - DNA, 30 bp, Sclerotinia sclerotiorum
  source 1..30: mol_type = other DNA; strain = 1980 UF-70
tggtgcggacgccccggacaaccctgcaaa

SEQ ID NO: 386 - DNA, 27 bp, Sclerotinia sclerotiorum
  source 1..27: mol_type = other DNA; strain = 1980 UF-70
tggtgcggccgtcccggtcaaccttgc

SEQ ID NO: 387 - DNA, 39 bp, Vanderwaltozyma polyspora
  source 1..39: mol_type = other DNA; strain = DSM 70294
tggcactggttgagactaagatatggtgaaccaatctac

SEQ ID NO: 388 - DNA, 36 bp, Vanderwaltozyma polyspora
  source 1..36: mol_type = other DNA; strain = DSM 70294
tggcactggttggaattggacaacggtcaaccaatc

SEQ ID NO: 389 - DNA, 39 bp, Vanderwaltozyma polyspora
  source 1..39: mol_type = other DNA; strain = DSM 70294
tggcactggttggaattggacaatggtcaaccaatctac

SEQ ID NO: 390 - DNA, 39 bp, Saccharomyces cerevisiae; identical to SEQ ID NO: 8
  source 1..39: mol_type = other DNA; strain = RM11-1a

SEQ ID NO: 391 - DNA, 39 bp, Saccharomyces cerevisiae; identical to SEQ ID NO: 9
  source 1..39: mol_type = other DNA; strain = RM11-1a

SEQ ID NO: 392 - DNA, 39 bp, Saccharomyces cerevisiae; identical to SEQ ID NO: 185
  source 1..39: mol_type = other DNA; strain = RM11-1a

SEQ ID NO: 393 - DNA, 39 bp, Saccharomyces cerevisiae; identical to SEQ ID NO: 8
  source 1..39: mol_type = other DNA; strain = JAY291

SEQ ID NO: 394 - DNA, 39 bp, Saccharomyces cerevisiae; identical to SEQ ID NO: 9
  source 1..39: mol_type = other DNA; strain = JAY291

SEQ ID NO: 395 - DNA, 39 bp, Saccharomyces cerevisiae; identical to SEQ ID NO: 185
  source 1..39: mol_type = other DNA; strain = JAY291

SEQ ID NO: 396 - DNA, 30 bp, Verticillium alfalfae; identical to SEQ ID NO: 366
  source 1..30: mol_type = other DNA; strain = VaMs.102

SEQ ID NO: 397 - DNA, 30 bp, Metarhizium acridum
  source 1..30: mol_type = other DNA; strain = CQMa 102
tggtgctaccggcctgggcaaccctgctgg

SEQ ID NO: 398 - DNA, 30 bp, Metarhizium acridum
  source 1..30: mol_type = other DNA; strain = CQMa 102
tggtgctggaggccaggtcagccatgctgg

SEQ ID NO: 399 - DNA, 30 bp, Metarhizium acridum
  source 1..30: mol_type = other DNA; strain = CQMa 102
tggtgctggcagcctggccaaccttgctgg

SEQ ID NO: 400 - DNA, 30 bp, Metarhizium robertsii
  source 1..30: mol_type = other DNA; strain = ARSEF 23
tggtgctggcagcctggccagccttgctgg

SEQ ID NO: 401 - DNA, 30 bp, Metarhizium robertsii
  source 1..30: mol_type = other DNA; strain = ARSEF 23
tggtgctggcgacctggccaaccttgctgg

SEQ ID NO: 402 - DNA, 39 bp, Saccharomyces cerevisiae; identical to SEQ ID NO: 12
  source 1..39: mol_type = other DNA; strain = FostersB

SEQ ID NO: 403 - DNA, 39 bp, Saccharomyces cerevisiae; identical to SEQ ID NO: 8
  source 1..39: mol_type = other DNA; strain = FostersB

SEQ ID NO: 404 - DNA, 39 bp, Saccharomyces cerevisiae; identical to SEQ ID NO: 9
  source 1..39: mol_type = other DNA; strain = FostersB

SEQ ID NO: 405 - DNA, 39 bp, Saccharomyces cerevisiae; identical to SEQ ID NO: 8
  source 1..39: mol_type = other DNA; strain = FostersO

SEQ ID NO: 406 - DNA, 39 bp, Saccharomyces cerevisiae; identical to SEQ ID NO: 9
  source 1..39: mol_type = other DNA; strain = FostersO

SEQ ID NO: 407 - DNA, 39 bp, Saccharomyces cerevisiae; identical to SEQ ID NO: 185
  source 1..39: mol_type = other DNA; strain = AWRI796

SEQ ID NO: 408 - DNA, 39 bp, Saccharomyces cerevisiae; identical to SEQ ID NO: 8
  source 1..39: mol_type = other DNA; strain = AWRI796

SEQ ID NO: 409 - DNA, 39 bp, Saccharomyces cerevisiae; identical to SEQ ID NO: 9
  source 1..39: mol_type = other DNA; strain = AWRI796

SEQ ID NO: 410 - DNA, 39 bp, Saccharomyces cerevisiae; identical to SEQ ID NO: 185
  source 1..39: mol_type = other DNA; strain = Vin13

SEQ ID NO: 411 - DNA, 39 bp, Saccharomyces cerevisiae; identical to SEQ ID NO: 8
  source 1..39: mol_type = other DNA; strain = Vin13

SEQ ID NO: 412 - DNA, 39 bp, Saccharomyces cerevisiae; identical to SEQ ID NO: 9
  source 1..39: mol_type = other DNA; strain = Vin13

SEQ ID NO: 413 - DNA, 39 bp, Saccharomyces cerevisiae; identical to SEQ ID NO: 12
  source 1..39: mol_type = other DNA; strain = Lalvin QA23

SEQ ID NO: 414 - DNA, 39 bp, Saccharomyces cerevisiae; identical to SEQ ID NO: 8
  source 1..39: mol_type = other DNA; strain = Lalvin QA23

SEQ ID NO: 415 - DNA, 39 bp, Saccharomyces cerevisiae; identical to SEQ ID NO: 9
  source 1..39: mol_type = other DNA; strain = Lalvin QA23

SEQ ID NO: 416 - DNA, 39 bp, Saccharomyces cerevisiae; identical to SEQ ID NO: 12
  source 1..39: mol_type = other DNA; strain = VL3

SEQ ID NO: 417 - DNA, 39 bp, Saccharomyces cerevisiae; identical to SEQ ID NO: 10
  source 1..39: mol_type = other DNA; strain = VL3

SEQ ID NO: 418 - DNA, 39 bp, Saccharomyces cerevisiae; identical to SEQ ID NO: 9
  source 1..39: mol_type = other DNA; strain = VL3

SEQ ID NO: 419 - DNA, 30 bp, Fusarium oxysporum
  source 1..30: mol_type = other DNA; strain = Fo5176
tggtgcacatggcgcggacaaccctgctgg

SEQ ID NO: 420 - DNA, 30 bp, Fusarium oxysporum
  source 1..30: mol_type = other DNA; strain = Fo5176
tggtgcatgtggcgaggacaaccttgctgg

SEQ ID NO: 421 - DNA, 30 bp, Fusarium oxysporum
  source 1..30: mol_type = other DNA; strain = Fo5176
tggtgcttgtggcgaggtcagccgtgctgg

SEQ ID NO: 422 - DNA, 30 bp, Fusarium oxysporum
  source 1..30: mol_type = other DNA; strain = Fo5176
tggtgtacttggcgcggacagccctgttgg

SEQ ID NO: 423 - DNA, 30 bp, Verticillium dahliae
  source 1..30: mol_type = other DNA; strain = VdLs.17
ccatgcccccgacctggccagggctgctgg

SEQ ID NO: 424 - DNA, 30 bp, Pyricularia oryzae
  source 1..30: mol_type = other DNA; strain = 70-15
tggtgcccgcgtcgcggccagccctgctgg

SEQ ID NO: 425 - DNA, 39 bp, Saccharomyces sp.
  source 1..39: mol_type = other DNA; note = Saccharomyces cerevisiae x Saccharomyces kudriavzevii VIN7
tggcactggttgcaattgaaacccggtcaaccaatgtac

SEQ ID NO: 426 - DNA, 39 bp, Saccharomyces sp.; identical to SEQ ID NO: 8
  source 1..39: mol_type = other DNA; note = Saccharomyces cerevisiae x Saccharomyces kudriavzevii VIN7

SEQ ID NO: 427 - DNA, 39 bp, Saccharomyces sp.; identical to SEQ ID NO: 9
  source 1..39: mol_type = other DNA; note = Saccharomyces cerevisiae x Saccharomyces kudriavzevii VIN7

SEQ ID NO: 428 - DNA, 39 bp, Saccharomyces cerevisiae; identical to SEQ ID NO: 7
  source 1..39: mol_type = other DNA; strain = CEN.PK113-7D

SEQ ID NO: 429 - DNA, 39 bp, Saccharomyces cerevisiae; identical to SEQ ID NO: 8
  source 1..39: mol_type = other DNA; strain = CEN.PK113-7D

SEQ ID NO: 430 - DNA, 39 bp, Saccharomyces cerevisiae; identical to SEQ ID NO: 9
  source 1..39: mol_type = other DNA; strain = CEN.PK113-7D

SEQ ID NO: 431 - DNA, 30 bp, Beauveria bassiana
  source 1..30: mol_type = other DNA; strain = ARSEF 2860
tggtgcatgagacccggtcagccatgctgg

SEQ ID NO: 432 - DNA, 39 bp, Saccharomyces kudriavzevii
  source 1..39: mol_type = other DNA; strain = IFO 1802
tggcactggttgcaattgaaacccggtcaaccaatgtat

SEQ ID NO: 433 - DNA, 39 bp, Saccharomyces kudriavzevii
  source 1..39: mol_type = other DNA; strain = IFO 1802
tggcactggttgcaactaaagccaggtcaaccaatgtac

SEQ ID NO: 434 - DNA, 39 bp, Saccharomyces kudriavzevii
  source 1..39: mol_type = other DNA; strain = IFO 1802
tggcactggttgcaattgagacctggtcagccaatgtac

SEQ ID NO: 435 - DNA, 30 bp, Fusarium pseudograminearum; identical to SEQ ID NO: 363
  source 1..30: mol_type = other DNA; strain = CS3096

SEQ ID NO: 436 - DNA, 30 bp, Fusarium pseudograminearum; identical to SEQ ID NO: 364
  source 1..30: mol_type = other DNA; strain = CS3096

SEQ ID NO: 437 - DNA, 30 bp, Pyricularia oryzae
  source 1..30: mol_type = other DNA; strain = Y34
tggtgcccccgccgcggccagccctgctgg

SEQ ID NO: 438 - DNA, 30 bp, Pyricularia oryzae
  source 1..30: mol_type = other DNA; strain = P131
tggtgcccgcgccgaggccagccttgctgg

SEQ ID NO: 439 - DNA, 27 bp, Pseudogymnoascus destructans
  source 1..27: mol_type = other DNA; strain = 20631-21
tgctggcgtccagggcagccatgtggc

SEQ ID NO: 440 - DNA, 27 bp, Botrytis cinerea
  source 1..27: mol_type = other DNA; strain = BcDW1
tggtgcggacgtcccggacaaccttgc

SEQ ID NO: 441 - DNA, 30 bp, Botrytis cinerea
  source 1..30: mol_type = other DNA; strain = BcDW1
tggtgtggacgtcccggacaaccatgcaag

SEQ ID NO: 442 - DNA, 30 bp, Fusarium odoratissimum; identical to SEQ ID NO: 420
  source 1..30: mol_type = other DNA

SEQ ID NO: 443 - DNA, 30 bp, Fusarium odoratissimum
  source 1..30: mol_type = other DNA
tggtgcttgtggcgtggccagccctgctgg

SEQ ID NO: 444 - DNA, 30 bp, Fusarium odoratissimum; identical to SEQ ID NO: 422
  source 1..30: mol_type = other DNA

SEQ ID NO: 445 - DNA, 30 bp, Fusarium oxysporum; identical to SEQ ID NO: 420
  source 1..30: mol_type = other DNA; note = f. sp. cubense race 1

SEQ ID NO: 446 - DNA, 30 bp, Fusarium oxysporum; identical to SEQ ID NO: 443
  source 1..30: mol_type = other DNA; note = f. sp. cubense race 1

SEQ ID NO: 447 - DNA, 30 bp, Fusarium oxysporum; identical to SEQ ID NO: 422
  source 1..30: mol_type = other DNA; note = f. sp. cubense race 1

SEQ ID NO: 448 - DNA, 30 bp, Fusarium graminearum; identical to SEQ ID NO: 361
  source 1..30: mol_type = other DNA; strain = PH-1

SEQ ID NO: 449 - DNA, 30 bp, Fusarium graminearum
  source 1..30: mol_type = other DNA; strain = PH-1
tggtgctggtggaagggacagccatgctgg

SEQ ID NO: 450 - DNA, 27 bp, Sclerotinia borealis
  source 1..27: mol_type = other DNA; strain = F-4128
tggtgcggacgcccaggtcaaccttgc

SEQ ID NO: 451 - DNA, 30 bp, Sclerotinia borealis
  source 1..30: mol_type = other DNA; strain = F-4128
tggtgtggacgccctggacaaccttgcaag

SEQ ID NO: 452 - DNA, 30 bp, Fusarium verticillioides; identical to SEQ ID NO: 374
  source 1..30: mol_type = other DNA; strain = 7600

SEQ ID NO: 453 - DNA, 30 bp, Fusarium verticillioides
  source 1..30: mol_type = other DNA; strain = 7600
tggtgtatgtggcgaggacagccatgctgg

SEQ ID NO: 454 - DNA, 39 bp, Saccharomyces cerevisiae; identical to SEQ ID NO: 185
  source 1..39: mol_type = other DNA; strain = P301

SEQ ID NO: 455 - DNA, 39 bp, Saccharomyces cerevisiae; identical to SEQ ID NO: 8
  source 1..39: mol_type = other DNA; strain = P301

SEQ ID NO: 456 - DNA, 39 bp, Saccharomyces cerevisiae; identical to SEQ ID NO: 9
  source 1..39: mol_type = other DNA; strain = P301

SEQ ID NO: 457 - DNA, 39 bp, Saccharomyces cerevisiae; identical to SEQ ID NO: 185
  source 1..39: mol_type = other DNA; strain = R103

SEQ ID NO: 458 - DNA, 39 bp, Saccharomyces cerevisiae; identical to SEQ ID NO: 10
  source 1..39: mol_type = other DNA; strain = R103

SEQ ID NO: 459 - DNA, 39 bp, Saccharomyces cerevisiae; identical to SEQ ID NO: 9
  source 1..39: mol_type = other DNA; strain = R103

SEQ ID NO: 460 - DNA, 30 bp, Fusarium oxysporum; identical to SEQ ID NO: 421
  source 1..30: mol_type = other DNA; strain = NRRL 32931

SEQ ID NO: 461 - DNA, 30 bp, Fusarium oxysporum
  source 1..30: mol_type = other DNA; strain = NRRL 32931
tggtgtacctggcgtggtcagccatgctgg

SEQ ID NO: 462 - DNA, 30 bp, Fusarium oxysporum; identical to SEQ ID NO: 453
  source 1..30: mol_type = other DNA; strain = NRRL 32931

SEQ ID NO: 463 - DNA, 30 bp, Fusarium oxysporum; identical to SEQ ID NO: 443
  source 1..30: mol_type = other DNA; strain = Fo47

SEQ ID NO: 464 - DNA, 30 bp, Fusarium oxysporum
  source 1..30: mol_type = other DNA; strain = Fo47
tggtgtacttggcgcggccagccctgttgg

SEQ ID NO: 465 - DNA, 30 bp, Fusarium oxysporum; identical to SEQ ID NO: 453
  source 1..30: mol_type = other DNA; strain = Fo47

SEQ ID NO: 466 - DNA, 30 bp, Fusarium oxysporum; identical to SEQ ID NO: 420
  source 1..30: mol_type = other DNA; strain = f. sp. lycopersici MN25

SEQ ID NO: 467 - DNA, 30 bp, Fusarium oxysporum; identical to SEQ ID NO: 443
  source 1..30: mol_type = other DNA; note = f. sp. lycopersici MN25

SEQ ID NO: 468 - DNA, 30 bp, Fusarium oxysporum
  source 1..30: mol_type = other DNA; note = f. sp. lycopersici MN25
tggtgtacttggcgaggtcagccttgctgg

SEQ ID NO: 469 - DNA, 30 bp, Fusarium oxysporum; identical to SEQ ID NO: 420
  source 1..30: mol_type = other DNA; note = f. sp. pisi HDV247

SEQ ID NO: 470 - DNA, 30 bp, Fusarium oxysporum; identical to SEQ ID NO: 421
  source 1..30: mol_type = other DNA; note = f. sp. pisi HDV247

SEQ ID NO: 471 - DNA, 30 bp, Fusarium oxysporum; identical to SEQ ID NO: 422
  source 1..30: mol_type = other DNA; note = f. sp. pisi HDV247

SEQ ID NO: 472 - DNA, 30 bp, Fusarium oxysporum
  source 1..30: mol_type = other DNA; note = f. sp. melonis 26406
tggtgcacctggagaggtcagccttgctgg

SEQ ID NO: 473 - DNA, 30 bp, Fusarium oxysporum; identical to SEQ ID NO: 420
  source 1..30: mol_type = other DNA; note = f. sp. melonis 26406

SEQ ID NO: 474 - DNA, 30 bp, Fusarium oxysporum; identical to SEQ ID NO: 443
  source 1..30: mol_type = other DNA; note = f. sp. melonis 26406

SEQ ID NO: 475 - DNA, 30 bp, Fusarium oxysporum; identical to SEQ ID NO: 420
  source 1..30: mol_type = other DNA; note = f. sp. raphani 54005

SEQ ID NO: 476 - DNA, 30 bp, Fusarium oxysporum; identical to SEQ ID NO: 421
  source 1..30: mol_type = other DNA; note = f. sp. raphani 54005

SEQ ID NO: 477 - DNA, 30 bp, Fusarium oxysporum; identical to SEQ ID NO: 422
  source 1..30: mol_type = other DNA; note = f. sp. raphani 54005

SEQ ID NO: 478 - DNA, 30 bp, Fusarium oxysporum; identical to SEQ ID NO: 420
  source 1..30: mol_type = other DNA; note = f. sp. radicis-lycopersici 26381

SEQ ID NO: 479 - DNA, 30 bp, Fusarium oxysporum; identical to SEQ ID NO: 421
  source 1..30: mol_type = other DNA; note = f. sp. radicis-lycopersici 26381

SEQ ID NO: 480 - DNA, 30 bp, Fusarium oxysporum; identical to SEQ ID NO: 464
  source 1..30: mol_type = other DNA; note = f. sp. radicis-lycopersici 26381

SEQ ID NO: 481 - DNA, 30 bp, Fusarium oxysporum; identical to SEQ ID NO: 421
  source 1..30: mol_type = other DNA; note = f. sp. conglutinans race 2 54008

SEQ ID NO: 482 - DNA, 30 bp, Fusarium oxysporum; identical to SEQ ID NO: 422
  source 1..30: mol_type = other DNA; note = f. sp. conglutinans race 2 54008

SEQ ID NO: 483 - DNA, 30 bp, Fusarium oxysporum; identical to SEQ ID NO: 453
  source 1..30: mol_type = other DNA; note = f. sp. conglutinans race 2 54008

SEQ ID NO: 484 - DNA, 30 bp, Fusarium odoratissimum; identical to SEQ ID NO: 419
  source 1..30: mol_type = other DNA; strain = NRRL 54006

SEQ ID NO: 485 - DNA, 30 bp, Fusarium odoratissimum; identical to SEQ ID NO: 443
  source 1..30: mol_type = other DNA; strain = NRRL 54006

SEQ ID NO: 486 - DNA, 30 bp, Fusarium odoratissimum; identical to SEQ ID NO: 453
  source 1..30: mol_type = other DNA; strain = NRRL 54006

SEQ ID NO: 487 - DNA, 30 bp, Fusarium oxysporum; identical to SEQ ID NO: 419
  source 1..30: mol_type = other DNA; note = f. sp. vasinfectum 25433

SEQ ID NO: 488 - DNA, 30 bp, Fusarium oxysporum; identical to SEQ ID NO: 421
  source 1..30: mol_type = other DNA; note = f. sp. vasinfectum 25433

SEQ ID NO: 489 - DNA, 30 bp, Fusarium oxysporum; identical to SEQ ID NO: 453
  source 1..30: mol_type = other DNA; note = f. sp. vasinfectum 25433

SEQ ID NO: 490 - DNA, 30 bp, Metarhizium robertsii
  source 1..30: mol_type = other DNA
tggtgctggaggccgggtcaaccatgttgg

SEQ ID NO: 491 - DNA, 30 bp, Metarhizium robertsii; identical to SEQ ID NO: 400
  source 1..30: mol_type = other DNA

SEQ ID NO: 492 - DNA, 30 bp, Fusarium graminearum; identical to SEQ ID NO: 361
  source 1..30: mol_type = other DNA

SEQ ID NO: 493 - DNA, 30 bp, Fusarium graminearum; identical to SEQ ID NO: 362
  source 1..30: mol_type = other DNA

SEQ ID NO: 494 - DNA, 39 bp, Saccharomyces cerevisiae; identical to SEQ ID NO: 10
  source 1..39: mol_type = other DNA; strain = Kyokai no. 7

SEQ ID NO: 495 - DNA, 39 bp, Saccharomyces cerevisiae; identical to SEQ ID NO: 9
  source 1..39: mol_type = other DNA; strain = Kyokai no. 7

SEQ ID NO: 496 - DNA, 39 bp, Saccharomyces cerevisiae; identical to SEQ ID NO: 7
  source 1..39: mol_type = other DNA; strain = Kyokai no. 7

SEQ ID NO: 497 - DNA, 30 bp, Ustilaginoidea virens
  source 1..30: mol_type = other DNA
tggtgcgatcgtcccgggcaaccatgctgg

SEQ ID NO: 498 - DNA, 30 bp, Ustilaginoidea virens
  source 1..30: mol_type = other DNA
tggtgctggcgacccggtgaaccctgctgg

SEQ ID NO: 499 - DNA, 30 bp, Ustilaginoidea virens
  source 1..30: mol_type = other DNA
tggtgctggcgtccgggtcagccgtgctgg

SEQ ID NO: 500 - DNA, 30 bp, Zygosaccharomyces rouxii; identical to SEQ ID NO: 332
  source 1..30: mol_type = other DNA

SEQ ID NO: 501 - DNA, 30 bp, Zygosaccharomyces rouxii
  source 1..30: mol_type = other DNA
cattttatcgaattggacccaggccaacca

SEQ ID NO: 502 - DNA, 30 bp, Zygosaccharomyces rouxii
  source 1..30: mol_type = other DNA
cactttgtagaattggacccaggtcaacca

SEQ ID NO: 503 - DNA, 39 bp, Saccharomyces cerevisiae; identical to SEQ ID NO: 10
  source 1..39: mol_type = other DNA

SEQ ID NO: 504 - DNA, 39 bp, Saccharomyces cerevisiae; identical to SEQ ID NO: 9
  source 1..39: mol_type = other DNA

SEQ ID NO: 505 - DNA, 39 bp, Saccharomyces cerevisiae; identical to SEQ ID NO: 185
  source 1..39: mol_type = other DNA

SEQ ID NO: 506 - DNA, 33 bp, unidentified
  misc_feature 1..33: note = Candida
  source 1..33: mol_type = other DNA
tggggatggttgagattctatccaggtgagcca

SEQ ID NO: 507 - DNA, 33 bp, unidentified
  misc_feature 1..33: note = Candida
  source 1..33: mol_type = other DNA
tggggttggttgagatttttcccaggtgagccc

SEQ ID NO: 508 - DNA, 30 bp, Zygosaccharomyces mellis
  source 1..30: mol_type = other DNA
cacttcattgagttagatgccggtcagcca

SEQ ID NO: 509 - DNA, 30 bp, Zygosaccharomyces mellis
  source 1..30: mol_type = other DNA
catttcgtagaattggatcctggccaaccc

SEQ ID NO: 510 - DNA, 36 bp, Metschnikowia sp.
  source 1..36: mol_type = other DNA; note = JCM 33374
tggcactgggtcgctttgggcttgggccaaccaatg

SEQ ID NO: 511 - DNA, 33 bp, Metschnikowia sp.
  source 1..33: mol_type = other DNA; note = JCM 33374
tggcactgggtcgctttgggcttgggccaacca

SEQ ID NO: 512 - DNA, 36 bp, Metschnikowia sp.
  source 1..36: mol_type = other DNA; note = JCM 33374
tggcactgggtctccttgggattgggccagccaatg

SEQ ID NO: 513 - DNA, 33 bp, Metschnikowia sp.
  source 1..33: mol_type = other DNA; note = JCM 33374
tggcactgggtctccttgggcttgggccagcca

SEQ ID NO: 514 - DNA, 36 bp, Metschnikowia sp.
  source 1..36: mol_type = other DNA; note = JCM 33374
tggcactgggtcgccttgggcttgggccaaccaatg

SEQ ID NO: 515 - DNA, 33 bp, Metschnikowia sp.
  source 1..33: mol_type = other DNA; note = JCM 33374
tggcactgggtcgccttgggcttgggccaacca

SEQ ID NO: 516 - DNA, 36 bp, Metschnikowia sp.
  source 1..36: mol_type = other DNA; note = JCM 33374
tggcattgggtctccttgggcttgggccaaccaatg

SEQ ID NO: 517 - DNA, 33 bp, Metschnikowia sp.
  source 1..33: mol_type = other DNA; note = JCM 33374
tggcattgggtctctttgggcttgggccaacca

SEQ ID NO: 518 - DNA, 39 bp, Saccharomyces cerevisiae; identical to SEQ ID NO: 8
  source 1..39: mol_type = other DNA

SEQ ID NO: 519 - DNA, 39 bp, Saccharomyces cerevisiae; identical to SEQ ID NO: 9
  source 1..39: mol_type = other DNA

SEQ ID NO: 520 - DNA, 39 bp, Saccharomyces cerevisiae; identical to SEQ ID NO: 10
  source 1..39: mol_type = other DNA

SEQ ID NO: 521 - DNA, 39 bp, Saccharomyces cerevisiae; identical to SEQ ID NO: 9
  source 1..39: mol_type = other DNA

SEQ ID NO: 522 - DNA, 39 bp, Saccharomyces cerevisiae; identical to SEQ ID NO: 10
  source 1..39: mol_type = other DNA

SEQ ID NO: 523 - DNA, 39 bp, Saccharomyces cerevisiae; identical to SEQ ID NO: 9
  source 1..39: mol_type = other DNA

SEQ ID NO: 524 - DNA, 27 bp, Monilinia fructicola
  source 1..27: mol_type = other DNA
tggtgcggacgccccggacaaggatgc

SEQ ID NO: 525 - DNA, 30 bp, Monilinia fructicola
  source 1..30: mol_type = other DNA
tggtgcggacgccctggtcaaggatgcaag

SEQ ID NO: 526 - DNA, 30 bp, Monilinia laxa
  source 1..30: mol_type = other DNA
tggtgcggacgccccggacaaggatgcaag

SEQ ID NO: 527 - DNA, 27 bp, Monilinia laxa
  source 1..27: mol_type = other DNA
tggtgcggacgccctggacaaggttgc

SEQ ID NO: 528 - DNA, 30 bp, Colletotrichum fructicola
  source 1..30: mol_type = other DNA
tggtgcacgaagcccggccagccttgctgg

SEQ ID NO: 529 - DNA, 30 bp, Colletotrichum asianum
  source 1..30: mol_type = other DNA
tggtgcaccgaacccggccagccctgctgg

SEQ ID NO: 530 - DNA, 30 bp, Colletotrichum asianum
  source 1..30: mol_type = other DNA
tggtgcacgaagcctgggcagccgtgctgg

SEQ ID NO: 531 - DNA, 30 bp, Colletotrichum asianum
  source 1..30: mol_type = other DNA
tggtgcactcagcccgggcagccatgctgg

SEQ ID NO: 532 - DNA, 30 bp, Fusarium pseudograminearum; identical to SEQ ID NO: 362
  source 1..30: mol_type = other DNA

SEQ ID NO: 533 - DNA, 30 bp, Fusarium pseudograminearum
  source 1..30: mol_type = other DNA
tggtgtacctggaagggacagccctgctgg

SEQ ID NO: 534 - DNA, 30 bp, Beauveria bassiana; identical to SEQ ID NO: 431
  source 1..30: mol_type = other DNA

SEQ ID NO: 535 - DNA, 39 bp, Saccharomyces cerevisiae; identical to SEQ ID NO: 7
  source 1..39: mol_type = other DNA

SEQ ID NO: 536 - DNA, 39 bp, Saccharomyces cerevisiae; identical to SEQ ID NO: 8
  source 1..39: mol_type = other DNA

SEQ ID NO: 537 - DNA, 39 bp, Saccharomyces cerevisiae; identical to SEQ ID NO: 9
  source 1..39: mol_type = other DNA

SEQ ID NO: 538 - DNA, 39 bp, Saccharomyces cerevisiae; identical to SEQ ID NO: 8
  source 1..39: mol_type = other DNA

SEQ ID NO: 539 - DNA, 39 bp, Saccharomyces cerevisiae; identical to SEQ ID NO: 9
  source 1..39: mol_type = other DNA

SEQ ID NO: 540 - DNA, 39 bp, Saccharomyces cerevisiae; identical to SEQ ID NO: 7
  source 1..39: mol_type = other DNA

SEQ ID NO: 541 - DNA, 30 bp, Verticillium dahliae; identical to SEQ ID NO: 423
  source 1..30: mol_type = other DNA; strain = VDG2

SEQ ID NO: 542 - DNA, 30 bp, Verticillium dahliae
  source 1..30: mol_type = other DNA; strain = VDG1
ccatgcccccgtcctggacagggctgctgg

SEQ ID NO: 543 - DNA, 30 bp, Colletotrichum gloeosporioides; identical to SEQ ID NO: 530
  source 1..30: mol_type = other DNA

SEQ ID NO: 544 - DNA, 33 bp, unidentified
  misc_feature 1..33: note = Candida
  source 1..33: mol_type = other DNA
tggggctggttaagatttatgccaggcgagcca

SEQ ID NO: 545 - DNA, 33 bp, unidentified; identical to SEQ ID NO: 544
  misc_feature 1..33: note = Candida
  source 1..33: mol_type = other DNA

SEQ ID NO: 546 - DNA, 39 bp, Saccharomyces cerevisiae; identical to SEQ ID NO: 12
  source 1..39: mol_type = other DNA

SEQ ID NO: 547 - DNA, 39 bp, Saccharomyces cerevisiae; identical to SEQ ID NO: 8
  source 1..39: mol_type = other DNA

SEQ ID NO: 548 - DNA, 39 bp, Saccharomyces cerevisiae; identical to SEQ ID NO: 9
  source 1..39: mol_type = other DNA

SEQ ID NO: 549 - DNA, 30 bp, Fusarium beomiforme
  source 1..30: mol_type = other DNA
tggtgcacctggcgcggacaaccgtgctgg

SEQ ID NO: 550 - DNA, 30 bp, Fusarium beomiforme; identical to SEQ ID NO: 376
  source 1..30: mol_type = other DNA

SEQ ID NO: 551 - DNA, 30 bp, Fusarium beomiforme
  source 1..30: mol_type = other DNA
tggtgcctctggcgcggacaaccttgctgg

SEQ ID NO: 552 - DNA, 30 bp, Colletotrichum fructicola
  source 1..30: mol_type = other DNA
tggtgcaccaagcccggccagccatgctgg

SEQ ID NO: 553 - DNA, 30 bp, Fusarium acutatum
  source 1..30: mol_type = other DNA
tggtgcatgtggcgaggacagccatgctgg

SEQ ID NO: 554 - DNA, 30 bp, Fusarium acutatum
  source 1..30: mol_type = other DNA
tggtgtacttggcgtggacagccctgctgg

SEQ ID NO: 555 - DNA, 30 bp, Fusarium austroafricanum
  source 1..30: mol_type = other DNA
tggtgctcctggaagggccagccttgctgg

SEQ ID NO: 556 - DNA, 30 bp, Fusarium albosuccineum
  source 1..30: mol_type = other DNA
tggtgcatctggcctggccaaccctgctgg

SEQ ID NO: 557 - DNA, 30 bp, Fusarium albosuccineum
  source 1..30: mol_type = other DNA
tggtgctggtggcccggtcagccttgctgg

SEQ ID NO: 558 - DNA, 24 bp, Fusarium albosuccineum
  source 1..24: mol_type = other DNA
tggtgctggtggcccggtcagcct

SEQ ID NO: 559 - DNA, 30 bp, Fusarium albosuccineum
  source 1..30: mol_type = other DNA
tggtgtgtctggcccggtcagccctgctgg

SEQ ID NO: 560 - DNA, 30 bp, Colletotrichum fructicola; identical to SEQ ID NO: 528
  source 1..30: mol_type = other DNA; strain = Nara gc5

SEQ ID NO: 561 - DNA, 30 bp, Fusarium agapanthi
  source 1..30: mol_type = other DNA
tggtgtacttggcgtggacaaccctgctgg

SEQ ID NO: 562 - DNA, 30 bp, Fusarium agapanthi; identical to SEQ ID NO: 453
  source 1..30: mol_type = other DNA

SEQ ID NO: 563 - DNA, 30 bp, Colletotrichum siamense
  source 1..30: mol_type = other DNA
tggtgcacgaagcctggccagccttgctgg

SEQ ID NO: 564 - DNA, 30 bp, Colletotrichum tropicale
  source 1..30: mol_type = other DNA
tggtgcaccaagcccggccaaccgtgctgg

SEQ ID NO: 565 - DNA, 30 bp, Colletotrichum siamense; identical to SEQ ID NO: 528
  source 1..30: mol_type = other DNA

SEQ ID NO: 566 - DNA, 30 bp, Colletotrichum siamense; identical to SEQ ID NO: 530
  source 1..30: mol_type = other DNA

SEQ ID NO: 567 - DNA, 30 bp, Colletotrichum siamense
  source 1..30: mol_type = other DNA
tggtgtaccaagcccggacagccatgctgg

SEQ ID NO: 568 - DNA, 30 bp, Colletotrichum fructicola; identical to SEQ ID NO: 552
  source 1..30: mol_type = other DNA

SEQ ID NO: 569 - DNA, 30 bp, Colletotrichum fructicola; identical to SEQ ID NO: 528
  source 1..30: mol_type = other DNA

SEQ ID NO: 570 - DNA, 30 bp, Colletotrichum viniferum
  source 1..30: mol_type = other DNA
tggtgcaccgagcccggccagccctgctgg

SEQ ID NO: 571 - DNA, 30 bp, Colletotrichum viniferum
  source 1..30: mol_type = other DNA
tggtgcactaagcccggccagccctgctgg

SEQ ID NO: 572 - DNA, 30 bp, Colletotrichum fructicola; identical to SEQ ID NO: 552
  source 1..30: mol_type = other DNA

SEQ ID NO: 573 - DNA, 30 bp, Fusarium gaditjirri
  source 1..30: mol_type = other DNA
tggtgcacctggaggggccaaccctgttgg

SEQ ID NO: 574 - DNA, 30 bp, Fusarium gaditjirri
  source 1..30: mol_type = other DNA
tggtgcttgtggcgtggccagccttgctgg

SEQ ID NO: 575 - DNA, 30 bp, Fusarium zealandicum
  source 1..30: mol_type = other DNA
tggtgtacccgccctggccagtcctgctgg

SEQ ID NO: 576 - DNA, 30 bp, Fusarium decemcellulare
  source 1..30: mol_type = other DNA
tggtgcatctggcctggccagccctgctgg

SEQ ID NO: 577 - DNA, 30 bp, Fusarium decemcellulare
  source 1..30: mol_type = other DNA
tggtgcgtttggcctggccagccttgctgg

SEQ ID NO: 578 - DNA, 30 bp, Fusarium decemcellulare
  source 1..30: mol_type = other DNA
tggtgctggtggcccggccagccttgctgg

SEQ ID NO: 579 - DNA, 30 bp, Fusarium heterosporum
  source 1..30: mol_type = other DNA
tggtgcacaatgccgggacagccatgctgg

SEQ ID NO: 580 - DNA, 30 bp, Metarhizium anisopliae
  source 1..30: mol_type = other DNA
tggtgcggccggcccggacaaccctgctgg

SEQ ID NO: 581 - DNA, 30 bp, Metarhizium anisopliae
  source 1..30: mol_type = other DNA
tggtgctggaggccaggtcaaccatgttgg

SEQ ID NO: 582 - DNA, 30 bp, Fusarium anthophilum
  source 1..30: mol_type = other DNA
tggtgcacatggcgcggacagccctgctgg

SEQ ID NO: 583 - DNA, 30 bp, Fusarium anthophilum
  source 1..30: mol_type = other DNA
tggtgcatgtggcgcggacaaccctgctgg

SEQ ID NO: 584 - DNA, 30 bp, Fusarium austroamericanum; identical to SEQ ID NO: 363
  source 1..30: mol_type = other DNA

SEQ ID NO: 585 - DNA, 30 bp, Fusarium austroamericanum; identical to SEQ ID NO: 364
  source 1..30: mol_type = other DNA

SEQ ID NO: 586 - DNA, 30 bp, Fusarium oxysporum; identical to SEQ ID NO: 420
  source 1..30: mol_type = other DNA

SEQ ID NO: 587 - DNA, 30 bp, Fusarium oxysporum; identical to SEQ ID NO: 443
  source 1..30: mol_type = other DNA

SEQ ID NO: 588 - DNA, 30 bp, Fusarium oxysporum; identical to SEQ ID NO: 464
  source 1..30: mol_type = other DNA

SEQ ID NO: 589 - DNA, 30 bp, Colletotrichum fructicola; identical to SEQ ID NO: 552
  source 1..30: mol_type = other DNA

SEQ ID NO: 590 - DNA, 30 bp, Colletotrichum siamense
  source 1..30: mol_type = other DNA
tggtgtaccaagcccggccaaccgtgctgg

SEQ ID NO: 591 - DNA, 30 bp, Colletotrichum aenigma; identical to SEQ ID NO: 564
  source 1..30: mol_type = other DNA

SEQ ID NO: 592 - DNA, 30 bp, Fusarium phyllophilum
  source 1..30: mol_type = other DNA
tggtgcacttggcgtggacagccctgctgg

SEQ ID NO: 593 - DNA, 30 bp, Fusarium phyllophilum
  source 1..30: mol_type = other DNA
tggtgcatgtggcgaggtcagccttgctgg

SEQ ID NO: 594 - DNA, 30 bp, Fusarium mexicanum
  source 1..30: mol_type = other DNA
tggtgcacctggcgaggccagccatgctgg

SEQ ID NO: 595 - DNA, 30 bp, Fusarium mexicanum
  source 1..30: mol_type = other DNA
tggtgcatgtggcgtggccagccatgctgg

SEQ ID NO: 596 - DNA, 30 bp, Fusarium napiforme; identical to SEQ ID NO: 593
  source 1..30: mol_type = other DNA

SEQ ID NO: 597 - DNA, 30 bp, Fusarium napiforme
  source 1..30: mol_type = other DNA
tggtgtacctggagaggtcagccttgctgg

SEQ ID NO: 598 - DNA, 30 bp, Fusarium pseudocircinatum
  source 1..30: mol_type = other DNA
tggtgcacctggaggggccaaccctgctgg

SEQ ID NO: 599 - DNA, 30 bp, Fusarium pseudocircinatum
  source 1..30: mol_type = other DNA
tggtgcatgtggcgtggtcagccctgctgg

SEQ ID NO: 600 - DNA, 30 bp, Fusarium pseudoanthophilum
  source 1..30: mol_type = other DNA
tggtgtacctggcgaggacaaccctgttgg

SEQ ID NO: 601 - DNA, 30 bp, Fusarium pseudoanthophilum
  source 1..30: mol_type = other DNA
tggtgtatgtggcgcggacaaccctgctgg

SEQ ID NO: 602 - DNA, 30 bp, Fusarium subglutinans; identical to SEQ ID NO: 420
  source 1..30: mol_type = other DNA

SEQ ID NO: 603 - DNA, 30 bp, Fusarium subglutinans; identical to SEQ ID NO: 554
  source 1..30: mol_type = other DNA

SEQ ID NO: 604 - DNA, 30 bp, Fusarium sp.
  source 1..30: mol_type = other DNA; note = NRRL 52700
tggtgcacatggcccggtcagccctgctgg

SEQ ID NO: 605 - DNA, 30 bp, Fusarium sp.
  source 1..30: mol_type = other DNA; note = NRRL 52700
tggtgcacctggagaggccagccatgctgg

SEQ ID NO: 606 - DNA, 30 bp, Fusarium sp.; identical to SEQ ID NO: 453
  source 1..30: mol_type = other DNA; note = NRRL 52700

SEQ ID NO: 607 - DNA, 30 bp, Fusarium tjaetaba; identical to SEQ ID NO: 377
  source 1..30: mol_type = other DNA

SEQ ID NO: 608 - DNA, 30 bp, Fusarium tjaetaba
  source 1..30: mol_type = other DNA
tggtgcatgtggcgtggccagccctgctgg

SEQ ID NO: 609 - DNA, 30 bp, Fusarium sp.
  source 1..30: mol_type = other DNA; note = NRRL 25303
tggtgcacttggcgtggtcaaccttgctgg

SEQ ID NO: 610 - DNA, 30 bp, Fusarium sp.; identical to SEQ ID NO: 373
  source 1..30: mol_type = other DNA; note = NRRL 25303

SEQ ID NO: 611 - DNA, 30 bp, Fusarium denticulatum; identical to SEQ ID NO: 608
  source 1..30: mol_type = other DNA

SEQ ID NO: 612 - DNA, 30 bp, Fusarium denticulatum
  source 1..30: mol_type = other DNA
tggtgtacctggagaggacagccttgctgg

SEQ ID NO: 613 - DNA, 30 bp, Fusarium circinatum
  source 1..30: mol_type = other DNA
tggtgtacctggcgcggacagccctgctgg

SEQ ID NO: 614 - DNA, 30 bp, Fusarium circinatum; identical to SEQ ID NO: 453
  source 1..30: mol_type = other DNA

SEQ ID NO: 615 - DNA, 30 bp, Fusarium globosum; identical to SEQ ID NO: 377
  source 1..30: mol_type = other DNA

SEQ ID NO: 616 - DNA, 30 bp, Fusarium globosum
  source 1..30: mol_type = other DNA
tggtgtatgtggcgaggacaaccttgctgg

SEQ ID NO: 617 - DNA, 30 bp, Fusarium mundagurra
  source 1..30: mol_type = other DNA
tggtgtacctggcgcggacaaccctgttgg

SEQ ID NO: 618 - DNA, 30 bp, Fusarium mundagurra; identical to SEQ ID NO: 453
  source 1..30: mol_type = other DNA

SEQ ID NO: 619 - DNA, 30 bp, Botrytis fragariae
  source 1..30: mol_type = other DNA
tggtgcggacgccctggtcaaccatgcaag

SEQ ID NO: 620 - DNA, 27 bp, Botrytis fragariae
  source 1..27: mol_type = other DNA
tggtgcggacgtcccggacaaccttgc

SEQ ID NO: 621 - DNA, 30 bp, Fusarium coicis
  source 1..30: mol_type = other DNA
tggtgtacctggcgtggacaaccgtgctgg

SEQ ID NO: 622 - DNA, 30 bp, Fusarium coicis; identical to SEQ ID NO: 453
  source 1..30: mol_type = other DNA

SEQ ID NO: 623 - DNA, 30 bp, Fusarium bulbicola
  source 1..30: mol_type = other DNA
tggtgcacttggcgcggtcaaccttgctgg

SEQ ID NO: 624 - DNA, 30 bp, Fusarium bulbicola; identical to SEQ ID NO: 420
  source 1..30: mol_type = other DNA

SEQ ID NO: 625 - DNA, 30 bp, Fusarium oxysporum; identical to SEQ ID NO: 443
  source 1..30: mol_type = other DNA; note = f. sp. conglutinans

SEQ ID NO: 626 - DNA, 30 bp, Fusarium oxysporum; identical to SEQ ID NO: 422
  source 1..30: mol_type = other DNA; note = f. sp. conglutinans

SEQ ID NO: 627 - DNA, 30 bp, Fusarium oxysporum; identical to SEQ ID NO: 453
  source 1..30: mol_type = other DNA; note = f. sp. conglutinans

SEQ ID NO: 628 - DNA, 30 bp, Ustilaginoidea virens; identical to SEQ ID NO: 497
  source 1..30: mol_type = other DNA

SEQ ID NO: 629 - DNA, 30 bp, Ustilaginoidea virens; identical to SEQ ID NO: 498
  source 1..30: mol_type = other DNA

SEQ ID NO: 630 - DNA, 30 bp, Ustilaginoidea virens; identical to SEQ ID NO: 499
  source 1..30: mol_type = other DNA

SEQ ID NO: 631 - DNA, 30 bp, Stachybotrys chartarum
  source 1..30: mol_type = other DNA; strain = IBT 7711
tggtgcacgcgccccggccagccgtgctgg

SEQ ID NO: 632 - DNA, 30 bp, Stachybotrys chartarum
  source 1..30: mol_type = other DNA; strain = IBT 7711
tggtgcgtccgtcccggccagccgtgctgg

SEQ ID NO: 633 - DNA, 30 bp, Stachybotrys chartarum; identical to SEQ ID NO: 631
  source 1..30: mol_type = other DNA; strain = IBT 40293

SEQ ID NO: 634 - DNA, 30 bp, Stachybotrys chartarum; identical to SEQ ID NO: 632
  source 1..30: mol_type = other DNA; strain = IBT 40293

SEQ ID NO: 635 - DNA, 30 bp, Stachybotrys chlorohalonata; identical to SEQ ID NO: 631
  source 1..30: mol_type = other DNA; strain = IBT 40285

SEQ ID NO: 636 - DNA, 30 bp, Stachybotrys chlorohalonata; identical to SEQ ID NO: 632
  source 1..30: mol_type = other DNA; strain = IBT 40285

SEQ ID NO: 637 - DNA, 30 bp, Stachybotrys chartarum
  source 1..30: mol_type = other DNA; strain = IBT 40288
tggtgcacgcgccccggccagccatgctgg

SEQ ID NO: 638 - DNA, 30 bp, Stachybotrys chartarum; identical to SEQ ID NO: 632
  source 1..30: mol_type = other DNA; strain = IBT 40288

SEQ ID NO: 639 - DNA, 30 bp, Metarhizium anisopliae; identical to SEQ ID NO: 400
  source 1..30: mol_type = other DNA

SEQ ID NO: 640 - DNA, 30 bp, Metarhizium anisopliae; identical to SEQ ID NO: 401
  source 1..30: mol_type = other DNA

SEQ ID NO: 641 - DNA, 30 bp, Metarhizium anisopliae
  source 1..30: mol_type = other DNA
tggtgctgggcgccgggtcaaccatgttgg

SEQ ID NO: 642 - DNA, 27 bp, Pseudogymnoascus sp.
  source 1..27: mol_type = other DNA; note = VKM-3557
tgctggcgtccaggccagccatgcgga

SEQ ID NO: 643 - DNA, 27 bp, Pseudogymnoascus sp.
  source 1..27: mol_type = other DNA; note = VKM F-3775
tgctggcgccccggccagccatgcggc

SEQ ID NO: 644 - DNA, 27 bp, Pseudogymnoascus sp.
  source 1..27: mol_type = other DNA; note = VKM F-4514 (FW-929)
tgctggcgtccaggtcaaccatgtggc

SEQ ID NO: 645 - DNA, 27 bp, Pseudogymnoascus sp.
  source 1..27: mol_type = other DNA; note = VKM F-4516 (FW-969)
tgctggcgtccaggccagccatgcgga

SEQ ID NO: 646 - DNA, 27 bp, Pseudogymnoascus sp.
  source 1..27: mol_type = other DNA; note = VKM F-4515 (FW-2607)
tgctggcgccctggccagccctgcggg

SEQ ID NO: 647 - DNA, 27 bp, Pseudogymnoascus sp.
  source 1..27: mol_type = other DNA; note = VKM F-103
tgctggcgtccaggccagccgtgcggc

SEQ ID NO: 648 - DNA, 27 bp, Pseudogymnoascus sp.
  source 1..27: mol_type = other DNA; note = VKM F-4517 (FW-2822)
tgctggcgccctggccagccctgcggg

SEQ ID NO: 649 - DNA, 27 bp, Pseudogymnoascus sp.
  source 1..27: mol_type = other DNA; note = VKM F-4518 (FW-2643)
tgctggcgccccggtcagccatgcggt

SEQ ID NO: 650 - DNA, 27 bp, Pseudogymnoascus sp.
  source 1..27: mol_type = other DNA; note = VKM F-4519 (FW-2642)
tgctggcgccctggccagccatgtggc

SEQ ID NO: 651 - DNA, 27 bp, Pseudogymnoascus sp.
  source 1..27: mol_type = other DNA; note = VKM F-4520 (FW-2644)
tgctggcgtcccggacagccctgcggc

SEQ ID NO: 652 - DNA, 30 bp, Beauveria bassiana; identical to SEQ ID NO: 431
  source 1..30: mol_type = other DNA; strain = D1-5

SEQ ID NO: 653 - DNA, 30 bp, Metarhizium album
  source 1..30: mol_type = other DNA; strain = ARSEF 1941
tggtgctggcggccaggcgagccatgctgg

SEQ ID NO: 654 - DNA, 30 bp, Metarhizium album
  source 1..30: mol_type = other DNA; strain = ARSEF 1941
tggtgctggcggccgggcatgccttgctgg

SEQ ID NO: 655 - DNA, 30 bp, Metarhizium anisopliae; identical to SEQ ID NO: 400
  source 1..30: mol_type = other DNA; strain = ARSEF 549

SEQ ID NO: 656 - DNA, 30 bp, Metarhizium anisopliae; identical to SEQ ID NO: 401
  source 1..30: mol_type = other DNA; strain = ARSEF 549

SEQ ID NO: 657 - DNA, 30 bp, Metarhizium anisopliae; identical to SEQ ID NO: 641
  source 1..30: mol_type = other DNA; strain = ARSEF 549

SEQ ID NO: 658 - DNA, 30 bp, Metarhizium brunneum; identical to SEQ ID NO: 580
  source 1..30: mol_type = other DNA; strain = ARSEF 3297

SEQ ID NO: 659 - DNA, 30 bp, Metarhizium brunneum; identical to SEQ ID NO: 581
  source 1..30: mol_type = other DNA; strain = ARSEF 3297

SEQ ID NO: 660 - DNA, 30 bp, Metarhizium guizhouense
  source 1..30: mol_type = other DNA; strain = ARSEF 977
tggtgcggcgcgccaggacaaccctgctgg

SEQ ID NO: 661 - DNA, 30 bp, Metarhizium guizhouense; identical to SEQ ID NO: 400
  source 1..30: mol_type = other DNA; strain = ARSEF 977

SEQ ID NO: 662 - DNA, 30 bp, Metarhizium guizhouense; identical to SEQ ID NO: 401
  source 1..30: mol_type = other DNA; strain = ARSEF 977

SEQ ID NO: 663 - DNA, 30 bp, Metarhizium majus
  source 1..30: mol_type = other DNA; strain = ARSEF 297
tggtgcggcgcgcccggacaaccctgctgg

SEQ ID NO: 664 - DNA, 30 bp, Metarhizium majus; identical to SEQ ID NO: 400
  source 1..30: mol_type = other DNA; strain = ARSEF 297

SEQ ID NO: 665 - DNA, 30 bp, Metarhizium majus; identical to SEQ ID NO: 401
  source 1..30: mol_type = other DNA; strain = ARSEF 297

SEQ ID NO: 666 - DNA, 30 bp, Metarhizium anisopliae
  source 1..30: mol_type = other DNA; strain = BRIP 53293
tggtgctggcggcctggccaaccttgctgg

SEQ ID NO: 667 - DNA, 30 bp, Metarhizium anisopliae; identical to SEQ ID NO: 641
  source 1..30: mol_type = other DNA; strain = BRIP 53293

SEQ ID NO: 668 - DNA, 30 bp, Metarhizium anisopliae; identical to SEQ ID NO: 666
  source 1..30: mol_type = other DNA; strain = BRIP 53284

SEQ ID NO: 669 - DNA, 30 bp, Metarhizium anisopliae; identical to SEQ ID NO: 641
  source 1..30: mol_type = other DNA; strain = BRIP 53284

SEQ ID NO: 670 - DNA, 30 bp, Diaporthe ampelina
  source 1..30: mol_type = other DNA
tggtgcttctggaagggccaggggtgctgg

SEQ ID NO: 671 - DNA, 30 bp, Fusarium fujikuroi; identical to SEQ ID NO: 376
  source 1..30: mol_type = other DNA

SEQ ID NO: 672 - DNA, 30 bp, Fusarium fujikuroi; identical to SEQ ID NO: 597
  source 1..30: mol_type = other DNA

SEQ ID NO: 673 - DNA, 30 bp, Fusarium fujikuroi; identical to SEQ ID NO: 592
  source 1..30: mol_type = other DNA

SEQ ID NO: 674 - DNA, 30 bp, Fusarium fujikuroi; identical to SEQ ID NO: 378
  source 1..30: mol_type = other DNA

SEQ ID NO: 675 - DNA, 30 bp, Fusarium fujikuroi; identical to SEQ ID NO: 609
  source 1..30: mol_type = other DNA

SEQ ID NO: 676 - DNA, 30 bp, Fusarium oxysporum; identical to SEQ ID NO: 421
  source 1..30: mol_type = other DNA; note = f. sp. lycopersici 4287

SEQ ID NO: 677 - DNA, 30 bp, Fusarium oxysporum; identical to SEQ ID NO: 461
  source 1..30: mol_type = other DNA; note = f. sp. lycopersici 4287

SEQ ID NO: 678 - DNA, 30 bp, Fusarium oxysporum; identical to SEQ ID NO: 453
  source 1..30: mol_type = other DNA; note = f. sp. lycopersici 4287

SEQ ID NO: 679 - DNA, 33 bp, unidentified; identical to SEQ ID NO: 506
  misc_feature 1..33: note = Candida
  source 1..33: mol_type = other DNA

SEQ ID NO: 680 - DNA, 33 bp, unidentified
  misc_feature 1..33: note = Candida
  source 1..33: mol_type = other DNA
tggggctggttaagattctttccaggtgagcct

SEQ ID NO: 681 - DNA, 39 bp, Saccharomyces eubayanus
  source 1..39: mol_type = other DNA
tggcactggttgaaattaagacctggtcaaccaatgtat

SEQ ID NO: 682 - DNA, 39 bp, Saccharomyces eubayanus
  source 1..39: mol_type = other DNA
tggcactggttgacattgagacctggtcaaccaatgtac

SEQ ID NO: 683 - DNA, 39 bp, Saccharomyces eubayanus
  source 1..39: mol_type = other DNA
tggcactggctgaagttgagacctggtcaaccaatgtac

SEQ ID NO: 684 - DNA, 39 bp, Saccharomyces eubayanus
  source 1..39: mol_type = other DNA
tggcactggctgcaattgagacctggccaaccaatgtac

SEQ ID NO: 685 - DNA, 39 bp, Saccharomyces sp.; identical to SEQ ID NO: 12
  source 1..39: mol_type = other DNA; note = 'boulardii'

SEQ ID NO: 686 - DNA, 39 bp, Saccharomyces sp.; identical to SEQ ID NO: 8
  source 1..39: mol_type = other DNA; note = 'boulardii'

SEQ ID NO: 687 - DNA, 39 bp, Saccharomyces sp.; identical to SEQ ID NO: 9
  source 1..39: mol_type = other DNA; note = 'boulardii'

SEQ ID NO: 688 - DNA, 30 bp, Escovopsis weberi
  source 1..30: mol_type = other DNA
tggtgcaccaaccccggccagggctgctgg

SEQ ID NO: 689 - DNA, 30 bp, Fusarium langsethiae
  source 1..30: mol_type = other DNA
tggtgcacctggaagggtcagccatgctgg

SEQ ID NO: 690 - DNA, 30 bp, Fusarium langsethiae; identical to SEQ ID NO: 362
  source 1..30: mol_type = other DNA

SEQ ID NO: 691 - DNA, 39 bp, Saccharomyces sp.; identical to SEQ ID NO: 12
  source 1..39: mol_type = other DNA; note = 'boulardii'

SEQ ID NO: 692 - DNA, 39 bp, Saccharomyces sp.; identical to SEQ ID NO: 8
  source 1..39: mol_type = other DNA; note = 'boulardii'

SEQ ID NO: 693 - DNA, 39 bp, Saccharomyces sp.; identical to SEQ ID NO: 9
  source 1..39: mol_type = other DNA; note = 'boulardii'

SEQ ID NO: 694 - DNA, 30 bp, Drechmeria coniospora
  source 1..30: mol_type = other DNA
tggtgcacccgtcccggaagcggatgctgg

SEQ ID NO: 695 - DNA, 39 bp, Saccharomyces cerevisiae; identical to SEQ ID NO: 185
  source 1..39: mol_type = other DNA

SEQ ID NO: 696 - DNA, 39 bp, Saccharomyces cerevisiae; identical to SEQ ID NO: 10
  source 1..39: mol_type = other DNA

SEQ ID NO: 697 - DNA, 39 bp, Saccharomyces cerevisiae; identical to SEQ ID NO: 9
  source 1..39: mol_type = other DNA

SEQ ID NO: 698 - DNA, 30 bp, Metarhizium rileyi
  source 1..30: mol_type = other DNA; strain = RCEF 4871
tggtgttggcgaccgggacagccttgctgg

SEQ ID NO: 699 - DNA, 27 bp, Pseudogymnoascus destructans
  source 1..27: mol_type = other DNA
tgctggcgtccagggcagccatgtggc

SEQ ID NO: 700 - DNA, 27 bp, Pochonia chlamydosporia
  source 1..27: mol_type = other DNA; strain = 170
tggtgctggaggcctggcgagccgtgc

SEQ ID NO: 701 - DNA, 30 bp, Pochonia chlamydosporia
  source 1..30: mol_type = other DNA; strain = 170
tggtgctggcgtccaggccagtcctgctgg

SEQ ID NO: 702 - DNA, 30 bp, Pochonia chlamydosporia
  source 1..30: mol_type = other DNA; strain = 170
tggtgttggagacccggccagccatgctgg

SEQ ID NO: 703 - DNA, 30 bp, Purpureocillium lilacinum
  source 1..30: mol_type = other DNA
tggtgcactcgccccggtcagccctgcaag

SEQ ID NO: 704 - DNA, 30 bp, Purpureocillium lilacinum
  source 1..30: mol_type = other DNA
tggtgcactcgccgcggccagccttgcaag

SEQ ID NO: 705 - DNA, 30 bp, Purpureocillium lilacinum
  source 1..30: mol_type = other DNA
tggtgcactcgccccggccagccctgcaag

SEQ ID NO: 706 - DNA, 30 bp, Purpureocillium lilacinum
  source 1..30: mol_type = other DNA
tggtgcactcgccgaggccaaccttgcaag

SEQ ID NO: 707 - DNA, 33 bp, Metschnikowia bicuspidata
  source 1..33: mol_type = other DNA; variety = var. bicuspidata NRRL YB-4993
tggcattgggttagattgaagattggccagcct

SEQ ID NO: 708 - DNA, 33 bp, Metschnikowia bicuspidata
  source 1..33: mol_type = other DNA; variety = var. bicuspidata NRRL YB-4993
tggcattgggttgctttgaagattggccagccc

SEQ ID NO: 709 - DNA, 39 bp, Metschnikowia bicuspidata
  source 1..39: mol_type = other DNA; variety = var. bicuspidata NRRL YB-4993
tggcactgggttgctttgaaaattggacaaccattcttc

SEQ ID NO: 710 - DNA, 33 bp, Metschnikowia bicuspidata
  source 1..33: mol_type = other DNA; variety = var. bicuspidata NRRL YB-4993
tggcactgggttgctttgaaaattggacaacca

SEQ ID NO: 711 - DNA, 30 bp, Fusarium poae
  source 1..30: mol_type = other DNA
tggtgcacctggaagggacagccctgctgg

SEQ ID NO: 712 - DNA, 30 bp, Fusarium poae; identical to SEQ ID NO: 449
  source 1..30: mol_type = other DNA

SEQ ID NO: 713 - DNA, 27 bp, Pseudogymnoascus sp.
  source 1..27: mol_type = other DNA; note = WSF 3629
tgctggcgccccggccagccctgtggc

SEQ ID NO: 714 - DNA, 27 bp, Pseudogymnoascus sp.
  source 1..27: mol_type = other DNA; note = 24MN13
tgctggcgtcctggccagccatgcggc

SEQ ID NO: 715 - DNA, 27 bp, Pseudogymnoascus sp.
  source 1..27: mol_type = other DNA; note = 23342-1-I1
tgctggcgccccggtcagccatgcggc

SEQ ID NO: 716 - DNA, 27 bp, Pseudogymnoascus sp.
  source 1..27: mol_type = other DNA; note = 05NY08
tgctggcgccctggccagccatgtggc

SEQ ID NO: 717 - DNA, 27 bp, Pseudogymnoascus sp.
  source 1..27: mol_type = other DNA; note = 03VT05
tgctggcgtcctggccagccatgtggt

SEQ ID NO: 718 - DNA, 27 bp, Pseudogymnoascus verrucosus
  source 1..27: mol_type = other DNA
tgctggcgccccggccagccctgcggc

SEQ ID NO: 719 - DNA, 30 bp, Drechmeria coniospora
  source 1..30: mol_type = other DNA
tggtgcactcgccccggaagtggttgctgg

SEQ ID NO: 720 - DNA, 39 bp, Hanseniaspora osmophila
  source 1..39: mol_type = other DNA
tggcactggttgaaatttgacgttggtgaaccattgtac

SEQ ID NO: 721 - DNA, 39 bp, Hanseniaspora osmophila
  source 1..39: mol_type = other DNA
tggcactggttgaaatttgaygttggtgaaccattgtac

SEQ ID NO: 722 - DNA, 27 bp, Penicilliopsis zonata
  source 1..27: mol_type = other DNA; strain = CBS 506.65
tggtgctggcagcctggtcagggttgc

SEQ ID NO: 723 - DNA, 39 bp, Saccharomyces cerevisiae; identical to SEQ ID NO: 10
  source 1..39: mol_type = other DNA

SEQ ID NO: 724 - DNA, 39 bp, Saccharomyces cerevisiae; identical to SEQ ID NO: 9
  source 1..39: mol_type = other DNA

SEQ ID NO: 725 - DNA, 39 bp, Saccharomyces cerevisiae; identical to SEQ ID NO: 194
  source 1..39: mol_type = other DNA

SEQ ID NO: 726 - DNA, 30 bp, Fusarium graminearum; identical to SEQ ID NO: 361
  source 1..30: mol_type = other DNA

SEQ ID NO: 727 - DNA, 30 bp, Fusarium graminearum; identical to SEQ ID NO: 362
  source 1..30: mol_type = other DNA

SEQ ID NO: 728 - DNA, 30 bp, Fusarium oxysporum; identical to SEQ ID NO: 421
  source 1..30: mol_type = other DNA; note = f. sp. radicis-cucumerinum

SEQ ID NO: 729 - DNA, 30 bp, Fusarium oxysporum; identical to SEQ ID NO: 468
  source 1..30: mol_type = other DNA; note = f. sp. radicis-cucumerinum

SEQ ID NO: 730 - DNA, 30 bp, Fusarium oxysporum; identical to SEQ ID NO: 453
  source 1..30: mol_type = other DNA; note = f. sp. radicis-cucumerinum

SEQ ID NO: 731 - DNA, 33 bp, unidentified; identical to SEQ ID NO: 506
  misc_feature 1..33: note = Candida
  source 1..33: mol_type = other DNA

SEQ ID NO: 732 - DNA, 33 bp, unidentified
  misc_feature 1..33: note = Candida
  source 1..33: mol_type = other DNA
tggggttggttaaggttcttccccggcgaacca

SEQ ID NO: 733 - DNA, 33 bp, unidentified; identical to SEQ ID NO: 506
  misc_feature 1..33: note = Candida
  source 1..33: mol_type = other DNA

SEQ ID NO: 734 - DNA, 33 bp, unidentified
  misc_feature 1..33: note = Candida
  source 1..33: mol_type = other DNA
tggggctggttgagatttttcccaggtgagcca

SEQ ID NO: 735 - DNA, 39 bp, Saccharomyces cerevisiae; identical to SEQ ID NO: 10
  source 1..39: mol_type = other DNA

SEQ ID NO: 736 - DNA, 39 bp, Saccharomyces cerevisiae; identical to SEQ ID NO: 9
  source 1..39: mol_type = other DNA

SEQ ID NO: 737 - DNA, 39 bp, Saccharomyces cerevisiae; identical to SEQ ID NO: 185
  source 1..39: mol_type = other DNA

SEQ ID NO: 738 - DNA, 30 bp, Beauveria bassiana
  source 1..30: mol_type = other DNA
tggtgcatgagacccggccagccatgctgg

SEQ ID NO: 739 - DNA, 30 bp, Verticillium dahliae; identical to SEQ ID NO: 542
  source 1..30: mol_type = other DNA

SEQ ID NO: 740 - DNA, 30 bp, Verticillium dahliae; identical to SEQ ID NO: 423
  source 1..30: mol_type = other DNA

SEQ ID NO: 741 - DNA, 30 bp, Verticillium dahliae; identical to SEQ ID NO: 423
  source 1..30: mol_type = other DNA

SEQ ID NO: 742 - DNA, 30 bp, Verticillium dahliae; identical to SEQ ID NO: 423
  source 1..30: mol_type = other DNA

SEQ ID NO: 743 - DNA, 30 bp, Verticillium dahliae; identical to SEQ ID NO: 423
  source 1..30: mol_type = other DNA

SEQ ID NO: 744 - DNA, 30 bp, Fusarium nygamai; identical to SEQ ID NO: 598
  source 1..30: mol_type = other DNA

SEQ ID NO: 745 - DNA, 30 bp, Fusarium nygamai; identical to SEQ ID NO: 608
  source 1..30: mol_type = other DNA

SEQ ID NO: 746 - DNA, 27 bp, Rutstroemia sp.
  source 1..27: mol_type = other DNA; note = NJR-2017a BVV2
tggtgcggacgcccaggacagccatgc

SEQ ID NO: 747 - DNA, 30 bp, Rutstroemia sp.
  source 1..30: mol_type = other DNA; note = NJR-2017a BVV2
tggtgcggccgccccggccaaccctgcaaa

SEQ ID NO: 748 - DNA, 30 bp, Rutstroemia sp.
  source 1..30: mol_type = other DNA; note = NJR-2017a BBW
tggtgcggacgcccaggacagccctgcaag

SEQ ID NO: 749 - DNA, 27 bp, Rutstroemia sp.
  source 1..27: mol_type = other DNA; note = NJR-2017a BBW
tggtgcggacgccccgggcagccttgc

SEQ ID NO: 750 - DNA, 27 bp, Rutstroemia sp.
  source 1..27: mol_type = other DNA; note = NJR-2017a WRK4
tggtgcggacgcccaggacagccctgc

SEQ ID NO: 751 - DNA, 30 bp, Rutstroemia sp.
  source 1..30: mol_type = other DNA; note = NJR-2017a WRK4
tggtgcggccgtcccggacaaccgtgcaag

SEQ ID NO: 752 - DNA, 33 bp, unidentified
  misc_feature 1..33: note = Candida
  source 1..33: mol_type = other DNA
tggggctggttgagattcatgccaggcgaacca

SEQ ID NO: 753 - DNA, 33 bp, unidentified; identical to SEQ ID NO: 506
  misc_feature 1..33: note = Candida
  source 1..33: mol_type = other DNA

SEQ ID NO: 754 - DNA, 30 bp, unidentified
  misc_feature 1..30: note = Candida
  source 1..30: mol_type = other DNA
tggggctggttgagattctttccaggtgag

SEQ ID NO: 755 - DNA, 33 bp, unidentified; identical to SEQ ID NO: 734
  misc_feature 1..33: note = Candida
  source 1..33: mol_type = other DNA

SEQ ID NO: 756 - DNA, 30 bp, Fusarium culmorum; identical to SEQ ID NO: 449
  source 1..30: mol_type = other DNA

SEQ ID NO: 757 - DNA, 30 bp, Fusarium culmorum
  source 1..30: mol_type = other DNA
tggtgtacctggaaaggccagccttgctgg

SEQ ID NO: 758 - DNA, 39 bp, Saccharomyces cerevisiae; identical to SEQ ID NO: 8
  source 1..39: mol_type = other DNA

SEQ ID NO: 759 - DNA, 39 bp, Saccharomyces cerevisiae; identical to SEQ ID NO: 9
  source 1..39: mol_type = other DNA

SEQ ID NO: 760 - DNA, 39 bp, Saccharomyces cerevisiae; identical to SEQ ID NO: 8
  source 1..39: mol_type = other DNA

SEQ ID NO: 761 - DNA, 39 bp, Saccharomyces cerevisiae; identical to SEQ ID NO: 9
  source 1..39: mol_type = other DNA

SEQ ID NO: 762 - DNA, 39 bp, Saccharomyces cerevisiae; identical to SEQ ID NO: 185
  source 1..39: mol_type = other DNA

SEQ ID NO: 763 - DNA, 39 bp, Saccharomyces cerevisiae; identical to SEQ ID NO: 7
  source 1..39: mol_type = other DNA

SEQ ID NO: 764 - DNA, 39 bp, Saccharomyces cerevisiae; identical to SEQ ID NO: 8
  source 1..39: mol_type = other DNA

SEQ ID NO: 765 - DNA, 39 bp, Saccharomyces cerevisiae; identical to SEQ ID NO: 9
  source 1..39: mol_type = other DNA

SEQ ID NO: 766 - DNA, 39 bp, Saccharomyces cerevisiae; identical to SEQ ID NO: 12
  source 1..39: mol_type = other DNA

SEQ ID NO: 767 - DNA, 33 bp, unidentified
  misc_feature 1..33: note = Candida
  source 1..33: mol_type = other DNA
tggggctggttgagattcatgccaggtgagcct

SEQ ID NO: 768 - DNA, 33 bp, unidentified; identical to SEQ ID NO: 544
  misc_feature 1..33: note = Candida
  source 1..33: mol_type = other DNA

SEQ ID NO: 769 - DNA, 30 bp, Purpureocillium lilacinum; identical to SEQ ID NO: 705
  source 1..30: mol_type = other DNA

SEQ ID NO: 770 - DNA, 30 bp, Purpureocillium lilacinum; identical to SEQ ID NO: 704
  source 1..30: mol_type = other DNA

SEQ ID NO: 771 - DNA, 36 bp, Metschnikowia aff. pulcherrima
  source 1..36: mol_type = other DNA
tggcactggggaagattgagaatgggccagccagtt

SEQ ID NO: 772 - DNA, 39 bp, Metschnikowia aff. pulcherrima
  source 1..39: mol_type = other DNA
tggcactggggccgcttgagaatgggtcagcccttctac

SEQ ID NO: 773 - DNA, 39 bp, Metschnikowia aff. pulcherrima
  source 1..39: mol_type = other DNA
tggcactggggccgtttgagaatgggccagccaatgtac

SEQ ID NO: 774 - DNA, 33 bp, Metschnikowia aff. pulcherrima
  source 1..33: mol_type = other DNA
tggcattggggccgtttgagaatgggccagcca

SEQ ID NO: 775 - DNA, 30 bp, Pyricularia oryzae; identical to SEQ ID NO: 437
  source 1..30: mol_type = other DNA

SEQ ID NO: 776 - DNA, 33 bp, unidentified; identical to SEQ ID NO: 506
  misc_feature 1..33: note = Candida
  source 1..33: mol_type = other DNA

SEQ ID NO: 777 - DNA, 30 bp, unidentified; identical to SEQ ID NO: 754
  misc_feature 1..30: note = Candida
  source 1..30: mol_type = other DNA

SEQ ID NO: 778 - DNA, 33 bp, unidentified; identical to SEQ ID NO: 734
  misc_feature 1..33: note = Candida
  source 1..33: mol_type = other DNA

SEQ ID NO: 779 - DNA, 33 bp, unidentified; identical to SEQ ID NO: 506
  misc_feature 1..33: note = Candida
  source 1..33: mol_type = other DNA

SEQ ID NO: 780 - DNA, 33 bp, unidentified; identical to SEQ ID NO: 507
  misc_feature 1..33: note = Candida
  source 1..33: mol_type = other DNA

SEQ ID NO: 781 - DNA, 36 bp, Kluyveromyces lactis
  source 1..36: mol_type = other DNA
tggagttggattacattaagacctggtcaaccaatt

SEQ ID NO: 782 - DNA, 30 bp, Fusarium fujikuroi; identical to SEQ ID NO: 592
  source 1..30: mol_type = other DNA

SEQ ID NO: 783 - DNA, 30 bp, Fusarium fujikuroi; identical to SEQ ID NO: 376
  source 1..30: mol_type = other DNA

SEQ ID NO: 784 - DNA, 30 bp, Fusarium fujikuroi; identical to SEQ ID NO: 592
  source 1..30: mol_type = other DNA

SEQ ID NO: 785 - DNA, 30 bp, Fusarium fujikuroi; identical to SEQ ID NO: 376
  source 1..30: mol_type = other DNA

SEQ ID NO: 786 - DNA, 30 bp, Fusarium fujikuroi
  source 1..30: mol_type = other DNA
tggtgcatgtggcgaggacagccttgctgg

SEQ ID NO: 787 - DNA, 30 bp, Fusarium fujikuroi
  source 1..30: mol_type = other DNA
tggtgtacatggcgtggacagccctgctgg

SEQ ID NO: 788 - DNA, 39 bp, Kluyveromyces marxianus; identical to SEQ ID NO: 285
  source 1..39: mol_type = other DNA

SEQ ID NO: 789 - DNA, 36 bp, Kluyveromyces marxianus; identical to SEQ ID NO: 286
  source 1..36: mol_type = other DNA

SEQ ID NO: 790 - DNA, 39 bp, Kluyveromyces marxianus; identical to SEQ ID NO: 287
  source 1..39: mol_type = other DNA

SEQ ID NO: 791 - DNA, 36 bp, Kluyveromyces marxianus; identical to SEQ ID NO: 288
  source 1..36: mol_type = other DNA

SEQ ID NO: 792 - DNA, 39 bp, Kluyveromyces marxianus; identical to SEQ ID NO: 289
  source 1..39: mol_type = other DNA

SEQ ID NO: 793 - DNA, 36 bp, Kluyveromyces marxianus; identical to SEQ ID NO: 290
  source 1..36: mol_type = other DNA

SEQ ID NO: 794 - DNA, 33 bp, Kluyveromyces marxianus; identical to SEQ ID NO: 291
  source 1..33: mol_type = other DNA

SEQ ID NO: 795 - DNA, 39 bp, Kluyveromyces marxianus; identical to SEQ ID NO: 292
  source 1..39: mol_type = other DNA

SEQ ID NO: 796 - DNA, 33 bp, Kluyveromyces marxianus; identical to SEQ ID NO: 293
  source 1..33: mol_type = other DNA

SEQ ID NO: 797 - DNA, 33 bp, Kluyveromyces marxianus; identical to SEQ ID NO: 294
  source 1..33: mol_type = other DNA

SEQ ID NO: 798 - DNA, 33 bp, Kluyveromyces marxianus; identical to SEQ ID NO: 295
  source 1..33: mol_type = other DNA

SEQ ID NO: 799 - DNA, 39 bp, Saccharomyces cerevisiae; identical to SEQ ID NO: 8
  source 1..39: mol_type = other DNA

SEQ ID NO: 800 - DNA, 39 bp, Saccharomyces cerevisiae; identical to SEQ ID NO: 9
  source 1..39: mol_type = other DNA

SEQ ID NO: 801 - DNA, 39 bp, Saccharomyces cerevisiae; identical to SEQ ID NO: 7
  source 1..39: mol_type = other DNA

SEQ ID NO: 802 - DNA, 39 bp, Saccharomyces paradoxus
  source 1..39: mol_type = other DNA
tggcactggttgaatttgagacctggtcaacctatgtac

SEQ ID NO: 803 - DNA, 39 bp, Saccharomyces paradoxus
  source 1..39: mol_type = other DNA
tggcattggttgcaactcaaaccgggccaaccaatgtac

SEQ ID NO: 804 - DNA, 39 bp, Saccharomyces paradoxus
  source 1..39: mol_type = other DNA
tggcactggttgcaattgaaacctggtcaaccaatgtac

SEQ ID NO: 805 - DNA, 39 bp, Saccharomyces pastorianus; identical to SEQ ID NO: 10
  source 1..39: mol_type = other DNA

SEQ ID NO: 806 - DNA, 39 bp, Saccharomyces pastorianus; identical to SEQ ID NO: 9
  source 1..39: mol_type = other DNA

SEQ ID NO: 807 - DNA, 39 bp, Saccharomyces pastorianus
  source 1..39: mol_type = other DNA
tggcattggttgcagttaaagcctggccaaccaatgtac

SEQ ID NO: 808 - DNA, 39 bp, Saccharomyces pastorianus
  source 1..39: mol_type = other DNA
tggcattggttgcagtttaaacccggccaaccaatgtac

SEQ ID NO: 809 - DNA, 39 bp, Saccharomyces pastorianus; identical to SEQ ID NO: 683
  source 1..39: mol_type = other DNA

SEQ ID NO: 810 - DNA, 39 bp, Saccharomyces pastorianus
  source 1..39: mol_type = other DNA
tggcattggttgcaactaaggccaggccaaccaatgtac

SEQ ID NO: 811 - DNA, 39 bp, Saccharomyces pastorianus
  source 1..39: mol_type = other DNA
tggcactggttgaaattgagacctggtcaaccaatgtac

SEQ ID NO: 812 - DNA, 39 bp, Saccharomyces pastorianus; identical to SEQ ID NO: 682
  source 1..39: mol_type = other DNA

SEQ ID NO: 813 - DNA, 30 bp, Fusarium oxysporum
  source 1..30: mol_type = other DNA; strain = Fo47
tggtgcacttggcgcggacagccctgctgg

SEQ ID NO: 814 - DNA, 30 bp, Fusarium oxysporum; identical to SEQ ID NO: 420
  source 1..30: mol_type = other DNA; strain = Fo47

SEQ ID NO: 815 - DNA, 30 bp, Fusarium oxysporum; identical to SEQ ID NO: 421
  source 1..30: mol_type = other DNA; strain = Fo47

SEQ ID NO: 816 - DNA, 36 bp, Zygotorulaspora mrakii
  source 1..36: mol_type = other DNA
tggcattggattaggttgagcagaggcgctccaatc

SEQ ID NO: 817 - DNA, 36 bp, Zygotorulaspora mrakii
  source 1..36: mol_type = other DNA
tggcattggattcaattgggcaagggtgccccaatt

SEQ ID NO: 818 - DNA, 36 bp, Zygotorulaspora mrakii
  source 1..36: mol_type = other DNA
tggcattggattcgtttgggcagaggtgctccaatc

SEQ ID NO: 819 - DNA, 30 bp, Metarhizium brunneum; identical to SEQ ID NO: 580
  source 1..30: mol_type = other DNA

SEQ ID NO: 820 - DNA, 30 bp, Metarhizium brunneum; identical to SEQ ID NO: 581
  source 1..30: mol_type = other DNA

SEQ ID NO: 821 - DNA, 39 bp, Torulaspora globosa
  source 1..39: mol_type = other DNA
tggcactggatcagtctacgtgccggccagcctatgtat

SEQ ID NO: 822 - DNA, 36 bp, Torulaspora globosa
  source 1..36: mol_type = other DNA
tggcactggatcagtctacgtgccggccagcctatg

SEQ ID NO: 823 - DNA, 33 bp, Torulaspora globosa
  source 1..33: mol_type = other DNA
tggcactggatcagtctacgtgccggccagcct

SEQ ID NO: 824 - DNA, 39 bp, Torulaspora globosa
  source 1..39: mol_type = other DNA
tggcattggatctccttgcgtacaggacaaccaatgtac

SEQ ID NO: 825 - DNA, 36 bp, Torulaspora globosa
  source 1..36: mol_type = other DNA
tggcattggatctccttgcgtacaggacaaccaatg

SEQ ID NO: 826 - DNA, 33 bp, Torulaspora globosa
  source 1..33: mol_type = other DNA
tggcattggatctccttgcgtacaggacaacca

SEQ ID NO: 827 - DNA, 39 bp, Torulaspora globosa
  source 1..39: mol_type = other DNA
tggcattggatcagtctacgtaccggccagcctatgtat

SEQ ID NO: 828 - DNA, 36 bp, Torulaspora globosa
  source 1..36: mol_type = other DNA
tggcattggatcagtctacgtaccggccagcctatg

SEQ ID NO: 829 - DNA, 33 bp, Torulaspora globosa
  source 1..33: mol_type = other DNA
tggcattggatttcgttgcgcactggacaaccc

SEQ ID NO: 830 - DNA, 30 bp, Monilinia fructigena
  source 1..30: mol_type = other DNA
tggtgcggacgccctggtcaaggctgcaag

SEQ ID NO: 831 - DNA, 27 bp, Monilinia fructigena
  source 1..27: mol_type = other DNA
tggtgtggacgtcccggacaaggatgc

SEQ ID NO: 832 - DNA, 30 bp, Fusarium proliferatum; identical to SEQ ID NO: 376
  source 1..30: mol_type = other DNA

SEQ ID NO: 833 - DNA, 30 bp, Fusarium proliferatum
  source 1..30: mol_type = other DNA
tggtgtacctggcgtggtcagccttgctgg

SEQ ID NO: 834 - DNA, 30 bp, Verticillium dahliae; identical to SEQ ID NO: 423
  source 1..30: mol_type = other DNA

SEQ ID NO: 835 - DNA, 30 bp, Fusarium verticillioides
  source 1..30: mol_type = other DNA
tggtgcacatggcgcgggcagccctgctgg

SEQ ID NO: 836 - DNA, 30 bp, Fusarium verticillioides; identical to SEQ ID NO: 376
  source 1..30: mol_type = other DNA

SEQ ID NO: 837 - DNA, 27 bp, Fusarium coffeatum
  source 1..27: mol_type = other DNA
tggtgcacctggaagggccagccatgc

SEQ ID NO: 838 - DNA, 30 bp, Fusarium coffeatum
  source 1..30: mol_type = other DNA
tggtgcctctggaagggtcagccatgctgg

SEQ ID NO: 839 - DNA, 30 bp, Fusarium coffeatum; identical to SEQ ID NO: 364
  source 1..30: mol_type = other DNA

SEQ ID NO: 840 - DNA, 30 bp, Fusarium coffeatum
  source 1..30: mol_type = other DNA
tggtgtacttggaagggacagccttgctgg

SEQ ID NO: 841 - DNA, 30 bp, Fusarium flagelliforme
  source 1..30: mol_type = other DNA
tggtgctggatcaagggacaaccttgctgg

SEQ ID NO: 842 - DNA, 30 bp, Fusarium flagelliforme
  source 1..30: mol_type = other DNA
tggtgctggatcaaaggccagccttgctgg

SEQ ID NO: 843 - DNA, 30 bp, Fusarium sporotrichioides; identical to SEQ ID NO: 689
  source 1..30: mol_type = other DNA

SEQ ID NO: 844 - DNA, 30 bp, Fusarium sporotrichioides
  source 1..30: mol_type = other DNA
tggtgctggtggaagggccagccatgctgg

SEQ ID NO: 845 - DNA, 30 bp, Fusarium longipes
  source 1..30: mol_type = other DNA
tggtgcacctggaagggccagccttgctgg

SEQ ID NO: 846 - DNA, 30 bp, Fusarium longipes; identical to SEQ ID NO: 844
  source 1..30: mol_type = other DNA

SEQ ID NO: 847 - DNA, 30 bp, Fusarium oxysporum; identical to SEQ ID NO: 443
  source 1..30: mol_type = other DNA; note = f. sp. cepae

SEQ ID NO: 848 - DNA, 30 bp, Fusarium oxysporum; identical to SEQ ID NO: 464
  source 1..30: mol_type = other DNA; note = f. sp. cepae

SEQ ID NO: 849 - DNA, 30 bp, Fusarium oxysporum; identical to SEQ ID NO: 453
  source 1..30: mol_type = other DNA; note = f. sp. cepae

SEQ ID NO: 850 - DNA, 30 bp, Fusarium oxysporum; identical to SEQ ID NO: 420
  source 1..30: mol_type = other DNA; note = f. sp. cepae

SEQ ID NO: 851 - DNA, 30 bp, Fusarium oxysporum; identical to SEQ ID NO: 443
  source 1..30: mol_type = other DNA; note = f. sp. cepae

SEQ ID NO: 852 - DNA, 30 bp, Fusarium oxysporum; identical to SEQ ID NO: 464
  source 1..30: mol_type = other DNA; note = f. sp. cepae

SEQ ID NO: 853 - DNA, 30 bp, Fusarium oxysporum; identical to SEQ ID NO: 420
  source 1..30: mol_type = other DNA; note = f. sp. cepae

SEQ ID NO: 854 - DNA, 30 bp, Fusarium oxysporum; identical to SEQ ID NO: 443
  source 1..30: mol_type = other DNA; note = f. sp. cepae

SEQ ID NO: 855 - DNA, 30 bp, Fusarium oxysporum; identical to SEQ ID NO: 464
  source 1..30: mol_type = other DNA; note = f. sp. cepae

SEQ ID NO: 856 - DNA, 30 bp, Fusarium oxysporum; identical to SEQ ID NO: 420
  source 1..30: mol_type = other DNA

SEQ ID NO: 857 - DNA, 30 bp, Fusarium oxysporum
  source 1..30: mol_type = other DNA
tggtgcttgtggcgaggacagccatgctgg

SEQ ID NO: 858 - DNA, 30 bp, Fusarium oxysporum; identical to SEQ ID NO: 422
  source 1..30: mol_type = other DNA

SEQ ID NO: 859 - DNA, 30 bp, Fusarium oxysporum; identical to SEQ ID NO: 420
  source 1..30: mol_type = other DNA

SEQ ID NO: 860 - DNA, 30 bp, Fusarium oxysporum; identical to SEQ ID NO: 443
  source 1..30: mol_type = other DNA

SEQ ID NO: 861 - DNA, 30 bp, Fusarium oxysporum; identical to SEQ ID NO: 464
  source 1..30: mol_type = other DNA

SEQ ID NO: 862 - DNA, 30 bp, Fusarium oxysporum; identical to SEQ ID NO: 421
  source 1..30: mol_type = other DNA

SEQ ID NO: 863 - DNA, 30 bp, Fusarium oxysporum; identical to SEQ ID NO: 464
  source 1..30: mol_type = other DNA

SEQ ID NO: 864 - DNA, 30 bp, Fusarium oxysporum; identical to SEQ ID NO: 453
  source 1..30: mol_type = other DNA

SEQ ID NO: 865 - DNA, 30 bp, Fusarium oxysporum; identical to SEQ ID NO: 609
  source 1..30: mol_type = other DNA

SEQ ID NO: 866 - DNA, 30 bp, Fusarium oxysporum; identical to SEQ ID NO: 421
  source 1..30: mol_type = other DNA

SEQ ID NO: 867 - DNA, 30 bp, Fusarium oxysporum; identical to SEQ ID NO: 453
  source 1..30: mol_type = other DNA

SEQ ID NO: 868 - DNA, 30 bp, Fusarium proliferatum; identical to SEQ ID NO: 377
  source 1..30: mol_type = other DNA

SEQ ID NO: 869 - DNA, 30 bp, Fusarium proliferatum; identical to SEQ ID NO: 376
  source 1..30: mol_type = other DNA

SEQ ID NO: 870 - DNA, 30 bp, Coniochaeta pulveracea
  source 1..30: mol_type = other DNA
tggtgcccccacaagggccagccatgctgg

SEQ ID NO: 871 - DNA, 30 bp, Coniochaeta pulveracea
  source 1..30: mol_type = other DNA
tggtgcccccacccgggtcagccatgctgg

SEQ ID NO: 872 - DNA, 30 bp, Verticillium nonalfalfae
  source 1..30: mol_type = other DNA
ccgtgcccccgacctggacagggctgctgg

SEQ ID NO: 873 - DNA, 30 bp, Verticillium dahliae; identical to SEQ ID NO: 423
  source 1..30: mol_type = other DNA

SEQ ID NO: 874 - DNA, 30 bp, Fusarium oxysporum; identical to SEQ ID NO: 813
  source 1..30: mol_type = other DNA; note = f. sp. narcissi

SEQ ID NO: 875 - DNA, 30 bp, Fusarium oxysporum; identical to SEQ ID NO: 420
  source 1..30: mol_type = other DNA; note = f. sp. narcissi

SEQ ID NO: 876 - DNA, 30 bp, Fusarium oxysporum; identical to SEQ ID NO: 443
  source 1..30: mol_type = other DNA; note = f. sp. narcissi

SEQ ID NO: 877 - DNA, 30 bp, Pochonia chlamydosporia
  source 1..30: mol_type = other DNA; strain = 123
tggtgctggaggccaggccagccttgctgg

SEQ ID NO: 878 - DNA, 30 bp, Pochonia chlamydosporia
  source 1..30: mol_type = other DNA; strain = 123
tggtgctggaggccaggccagtcatgctgg

SEQ ID NO: 879 - DNA, 30 bp, Fusarium fujikuroi; identical to SEQ ID NO: 357
  source 1..30: mol_type = other DNA

SEQ ID NO: 880 - DNA, 30 bp, Fusarium fujikuroi; identical to SEQ ID NO: 358
  source 1..30: mol_type = other DNA

SEQ ID NO: 881 - DNA, 30 bp, Fusarium fujikuroi; identical to SEQ ID NO: 358
  source 1..30: mol_type = other DNA

SEQ ID NO: 882 - DNA, 30 bp, Fusarium fujikuroi; identical to SEQ ID NO: 787
  source 1..30: mol_type = other DNA

SEQ ID NO: 883 - DNA, 30 bp, Fusarium fujikuroi; identical to SEQ ID NO: 592
  source 1..30: mol_type = other DNA

SEQ ID NO: 884 - DNA, 30 bp, Fusarium fujikuroi; identical to SEQ ID NO: 376
  source 1..30: mol_type = other DNA

SEQ ID NO: 885 - DNA, 30 bp, Fusarium fujikuroi; identical to SEQ ID NO: 786
  source 1..30: mol_type = other DNA

SEQ ID NO: 886 - DNA, 30 bp, Fusarium fujikuroi; identical to SEQ ID NO: 787
  source 1..30: mol_type = other DNA

SEQ ID NO: 887 - DNA, 30 bp, Fusarium fujikuroi; identical to SEQ ID NO: 592
  source 1..30: mol_type = other DNA

SEQ ID NO: 888 - DNA, 30 bp, Fusarium fujikuroi; identical to SEQ ID NO: 378
  source 1..30: mol_type = other DNA

SEQ ID NO: 889 - DNA, 30 bp, Fusarium fujikuroi; identical to SEQ ID NO: 358
  source 1..30: mol_type = other DNA

SEQ ID NO: 890 - DNA, 30 bp, Fusarium fujikuroi; identical to SEQ ID NO: 461
  source 1..30: mol_type = other DNA

SEQ ID NO: 891 - DNA, 30 bp, Fusarium oxysporum
  source 1..30: mol_type = other DNA
tggtgcacatggcgaggtcagccttgctgg

SEQ ID NO: 892 - DNA, 30 bp, Fusarium oxysporum; identical to SEQ ID NO: 421
  source 1..30: mol_type = other DNA

SEQ ID NO: 893 - DNA, 30 bp, Fusarium oxysporum; identical to SEQ ID NO: 453
  source 1..30: mol_type = other DNA

SEQ ID NO: 894 - DNA, 39 bp, Lachancea sp.
  source 1..39: mol_type = other DNA; note = CBS 6924
tggagatggttgagactagacagaggacagcctatgtac

SEQ ID NO: 895 - DNA, 33 bp, Lachancea sp.
  source 1..33: mol_type = other DNA; note = CBS 6924
tggttgagattagacagaggtcagccaatgtac

SEQ ID NO: 896 - DNA, 39 bp, Lachancea meyersii
  source 1..39: mol_type = other DNA; strain = CBS 8951
tggcactggttgagattggacagaggacagccaatgtac

SEQ ID NO: 897 - DNA, 39 bp, Lachancea meyersii
  source 1..39: mol_type = other DNA; strain = CBS 8951
tggcattggttgaaactcgacagaggccaaccaatgtac

SEQ ID NO: 898 - DNA, 33 bp, Lachancea meyersii
  source 1..33: mol_type = other DNA; strain = CBS 8951
tggcattggttgaaactcgacagaggccaacca

SEQ ID NO: 899 - DNA, 33 bp, Lachancea meyersii
  source 1..33: mol_type = other DNA; strain = CBS 8951
tggcattggttgagacttgacaggggacaacca

SEQ ID NO: 900 - DNA, 39 bp, Lachancea dasiensis
  source 1..39: mol_type = other DNA; strain = CBS 10888
tggaagtggctacgtttgggtcgcggccagccaatgtac

SEQ ID NO: 901 - DNA, 33 bp, Lachancea dasiensis
  source 1..33: mol_type = other DNA; strain = CBS 10888
tggaagtggctacgtttgggtcgcggccagcca

SEQ ID NO: 902 - DNA, 39 bp, Lachancea dasiensis
  source 1..39: mol_type = other DNA; strain = CBS 10888
tggagctggttacgtcttgggagaggacagcccatgtat

SEQ ID NO: 903 - DNA, 33 bp, Lachancea dasiensis
  source 1..33: mol_type = other DNA; strain = CBS 10888
tggagctggttacgtcttgggagaggacagccc

SEQ ID NO: 904 - DNA, 39 bp, Lachancea dasiensis
  source 1..39: mol_type = other DNA; strain = CBS 10888
tggaggtggctacgcctaggacgcggccagcctatgtat

SEQ ID NO: 905 - DNA, 33 bp, Lachancea dasiensis
  source 1..33: mol_type = other DNA; strain = CBS 10888
tggaggtggctacgcctaggacgcggccagcct

SEQ ID NO: 906 - DNA, 39 bp, Lachancea dasiensis
  source 1..39: mol_type = other DNA; strain = CBS 10888
tggcagtggctccgtcttggccgtggccagcccatgtac

SEQ ID NO: 907 - DNA, 33 bp, Lachancea dasiensis
  source 1..33: mol_type = other DNA; strain = CBS 10888
tggcagtggctccgtcttggccgtggccagccc

SEQ ID NO: 908 - DNA, 39 bp, Lachancea dasiensis
  source 1..39: mol_type = other DNA; strain = CBS 10888
tggcgttggttgcggctcgacaggggccagcccatgtac

SEQ ID NO: 909 - DNA, 33 bp, Lachancea dasiensis
  source 1..33: mol_type = other DNA; strain = CBS 10888
tggcgttggttgcggctcgacaggggccagccc

SEQ ID NO: 910 - DNA, 33 bp, Lachancea dasiensis
  source 1..33: mol_type = other DNA; strain = CBS 10888
tggctacgcctaggacgcggccagcctatgtat

SEQ ID NO: 911 - DNA, 33 bp, Lachancea dasiensis
  source 1..33: mol_type = other DNA; strain = CBS 10888
tggttgcggctcgacaggggccagcccatgtac

SEQ ID NO: 912 - DNA, 39 bp, Lachancea nothofagi
  source 1..39: mol_type = other DNA; strain = CBS 11611
tggacatggttgaagctcgacaggggtcagccaatgtat

SEQ ID NO: 913 - DNA, 33 bp, Lachancea nothofagi
  source 1..33: mol_type = other DNA; strain = CBS 11611
tggacatggttgaagctcgacaggggtcagcca

SEQ ID NO: 914 - DNA, 33 bp, Lachancea nothofagi
  source 1..33: mol_type = other DNA; strain = CBS 11611
tggagatggttgaggctcgacagaggccagcca

SEQ ID NO: 915 - DNA, 39 bp, Lachancea nothofagi
  source 1..39: mol_type = other DNA; strain = CBS 11611
tggagatggttgaggctcgacagaggccagcctatgtac

SEQ ID NO: 916 - DNA, 39 bp, Lachancea nothofagi
  source 1..39: mol_type = other DNA; strain = CBS 11611
tggagctggctaagactcgataggggccagccaatgtat

SEQ ID NO: 917 - DNA, 33 bp, Lachancea nothofagi
  source 1..33: mol_type = other DNA; strain = CBS 11611
tggagctggctaagactcgataggggccagcca

SEQ ID NO: 918 - DNA, 33 bp, Lachancea nothofagi
  source 1..33: mol_type = other DNA; strain = CBS 11611
tggttgaagctcgacaggggtcagccaatgtat

SEQ ID NO: 919 - DNA, 33 bp, Lachancea nothofagi
  source 1..33: mol_type = other DNA; strain = CBS 11611
tggttgaggctcgacagaggccagcctatgtac

SEQ ID NO: 920 - DNA, 30 bp, Fusarium fujikuroi; identical to SEQ ID NO: 786
  source 1..30: mol_type = other DNA

SEQ ID NO: 921 - DNA, 30 bp, Fusarium fujikuroi; identical to SEQ ID NO: 787
  source 1..30: mol_type = other DNA

SEQ ID NO: 922 - DNA, 30 bp, Fusarium fujikuroi; identical to SEQ ID NO: 358
  source 1..30: mol_type = other DNA

SEQ ID NO: 923 - DNA, 30 bp, Fusarium fujikuroi
  source 1..30: mol_type = other DNA
tggtgtacctggaggggccaaccctgttgg

SEQ ID NO: 924 - DNA, 39 bp, Lachancea fermentati
  source 1..39: mol_type = other DNA
tggcactggctgcgccttggcaagggccagccgctatac

SEQ ID NO: 925 - DNA, 39 bp, Lachancea fermentati
  source 1..39: mol_type = other DNA
tggcactggctgcggctcagcagcggccagccactctac

SEQ ID NO: 926 - DNA, 39 bp, Kazachstania saulgeensis
  source 1..39: mol_type = other DNA
tggcactggttggaactagactggggtcaaccattatac

SEQ ID NO: 927 - DNA, 39 bp, Kazachstania saulgeensis
  source 1..39: mol_type = other DNA
tggcattggttggaattagactggggtcaaccattatac

SEQ ID NO: 928 - DNA, 39 bp, Saccharomycodes ludwigii
  source 1..39: mol_type = other DNA
tggcaatggttaagtttccagtggggggagccaatgtac

SEQ ID NO: 929 - DNA, 39 bp, Saccharomycodes ludwigii
  source 1..39: mol_type = other DNA
tggcaatggttgactttccaatggggggaaccaatgtat

SEQ ID NO: 930 - DNA, 30 bp, Chlorociboria aeruginascens
  source 1..30: mol_type = other DNA
aagtgtggtcgacccggtcaaggttgcaag

SEQ ID NO: 931 - DNA, 27 bp, Botryotinia calthae
  source 1..27: mol_type = other DNA
tggtgcggacgtcccggacaaccttgc

SEQ ID NO: 932 - DNA, 30 bp, Botryotinia calthae
  source 1..30: mol_type = other DNA
tggtgtggacgtcccgggcaaccatgcaag

SEQ ID NO: 933 - DNA, 30 bp, Botrytis tulipae
  source 1..30: mol_type = other DNA
tggtgtggacgcccaggacaaccatgcaag

SEQ ID NO: 934 - DNA, 27 bp, Botrytis tulipae
  source 1..27: mol_type = other DNA
tggtgtggacgtcccggacaaccttgc

SEQ ID NO: 935 - DNA, 30 bp, Botrytis paeoniae
  source 1..30: mol_type = other DNA
tggtgcggaagacccggtcaaccatgtaag

SEQ ID NO: 936 - DNA, 27 bp, Botrytis paeoniae
  source 1..27: mol_type = other DNA
tggtgcggacgtcccggacaaccttgc

SEQ ID NO: 937 - DNA, 27 bp, Botrytis hyacinthi
  source 1..27: mol_type = other DNA
tggtgcggacgcccaggacaaccttgc

SEQ ID NO: 938 - DNA, 30 bp, Botrytis hyacinthi
  source 1..30: mol_type = other DNA
tggtgcggacgtcccggacaaccatgcaaa

SEQ ID NO: 939 - DNA, 30 bp, Botryotinia convoluta
  source 1..30: mol_type = other DNA
tggtgcggacgccccggtcaaccatgcaag

SEQ ID NO: 940 - DNA, 27 bp, Botryotinia convoluta
  source 1..27: mol_type = other DNA
tggtgtggacgcccaggacaaccctgc

SEQ ID NO: 941 - DNA, 30 bp, Botryotinia narcissicola
  source 1..30: mol_type = other DNA
tggtgcggacgccccggtcaaccatgtaaa

SEQ ID NO: 942 - DNA, 27 bp, Botryotinia narcissicola
  source 1..27: mol_type = other DNA
tggtgcggacgtcctggacaaccttgc

SEQ ID NO: 943 - DNA, 30 bp, Botrytis elliptica
  source 1..30: mol_type = other DNA
tggtgcggaagacccggacaaccatgcaag

SEQ ID NO: 944 - DNA, 27 bp, Botrytis elliptica
  source 1..27: mol_type = other DNA
tggtgcggacgtcccggacaaccttgc

SEQ ID NO: 945 - DNA, 30 bp, Botrytis porri; identical to SEQ ID NO: 943
  source 1..30: mol_type = other DNA

SEQ ID NO: 946 - DNA, 27 bp, Botrytis porri
  source 1..27: mol_type = other DNA
tggtgcggacgcccaggacaaccttgc

SEQ ID NO: 947 - DNA, 27 bp, Botrytis galanthina
  source 1..27: mol_type = other DNA
tggtgcggacgtccaggacaaccttgc

SEQ ID NO: 948 - DNA, 30 bp, Botrytis galanthina; identical to SEQ ID NO: 441
  source 1..30: mol_type = other DNA

SEQ ID NO: 949 - DNA, 30 bp, Pyricularia grisea
  source 1..30: mol_type = other DNA
tggtgcccacgccggggccagccgtgctgg

SEQ ID NO: 950 - DNA, 30 bp, Pyricularia sp.
  source 1..30: mol_type = other DNA; note = CBS 133598
tggtgcccgcgccgtggccaaccctgctgg

SEQ ID NO: 951 - DNA, 30 bp, Pyricularia pennisetigena; identical to SEQ ID NO: 437
  source 1..30: mol_type = other DNA

SEQ ID NO: 952 - DNA, 30 bp, Fusarium oxysporum; identical to SEQ ID NO: 421
  source 1..30: mol_type = other DNA; note = f. sp. cubense

SEQ ID NO: 953 - DNA, 30 bp, Fusarium oxysporum; identical to SEQ ID NO: 422
  source 1..30: mol_type = other DNA; note = f. sp. cubense

SEQ ID NO: 954 - DNA, 30 bp, Fusarium oxysporum; identical to SEQ ID NO: 453
  source 1..30: mol_type = other DNA; note = f. sp. cubense

SEQ ID NO: 955 - DNA, 30 bp, Metarhizium rileyi
  source 1..30: mol_type = other DNA
tggtgctggcgaccaggacagccttgctgg

SEQ ID NO: 956 - DNA, 30 bp, Fusarium oxysporum; identical to SEQ ID NO: 420
  source 1..30: mol_type = other DNA; note = f. sp. cubense

SEQ ID NO: 957 - DNA, 30 bp, Fusarium oxysporum; identical to SEQ ID NO: 421
  source 1..30: mol_type = other DNA; note = f. sp. cubense

SEQ ID NO: 958 - DNA, 30 bp, Fusarium oxysporum; identical to SEQ ID NO: 422
  source 1..30: mol_type = other DNA; note = f. sp. cubense

SEQ ID NO: 959 - DNA, 30 bp, Fusarium graminearum
  source 1..30: mol_type = other DNA
tggtgcacctggaaggggcagccctgttgg

SEQ ID NO: 960 - DNA, 30 bp, Fusarium graminearum; identical to SEQ ID NO: 844
  source 1..30: mol_type = other DNA

SEQ ID NO: 961 - protein, 9 aa, Eremothecium cymbalariae
  REGION 1..9: note = Amino acid sequence of SEQ ID NO:1
WHWLRFDRG

SEQ ID NO: 962 - protein, 12 aa, Eremothecium cymbalariae
  REGION 1..12: note = Amino acid sequence of SEQ ID NO:2
WHWLRFDRGQPI

SEQ ID NO: 963 - protein, 12 aa, Eremothecium cymbalariae
  REGION 1..12: note = Amino acid sequence of SEQ ID NO:3
WHWLRFSKGEPL

SEQ ID NO: 964 - protein, 11 aa, Eremothecium cymbalariae
  REGION 1..11: note = Amino acid sequence of SEQ ID NO:4
WHWLRFSKGEP

SEQ ID NO: 965 - protein, 13 aa, Eremothecium cymbalariae
  REGION 1..13: note = Amino acid sequence of SEQ ID NO:5
WHWLRFNRGEPMY

SEQ ID NO: 966 - protein, 11 aa, Eremothecium cymbalariae
  REGION 1..11: note = Amino acid sequence of SEQ ID NO:6
WHWLRFNRGEP

SEQ ID NO: 967 - protein, 13 aa, Saccharomyces cerevisiae
  REGION 1..13: note = Amino acid sequence of SEQ ID NO:7
WHWLQLKPGQPMY

SEQ ID NO: 968 - protein, 13 aa, Saccharomyces cerevisiae
  REGION 1..13: note = Amino acid sequence of SEQ ID NO:8
WHWLNLRPGQPMY

SEQ ID NO: 969 - protein, 13 aa, Saccharomyces cerevisiae
  REGION 1..13: note = Amino acid sequence of SEQ ID NO:9
WHWLQLKPGQPMY

SEQ ID NO: 970 - protein, 13 aa, Saccharomyces cerevisiae
  REGION 1..13: note = Amino acid sequence of SEQ ID NO:10
WHWLNLRPGQPMY

SEQ ID NO: 971 - protein, 13 aa, Saccharomyces cerevisiae
  REGION 1..13: note = Amino acid sequence of SEQ ID NO:11
WHWLQLKPGQPMY

SEQ ID NO: 972 - protein, 13 aa, Saccharomyces cerevisiae
  REGION 1..13: note = Amino acid sequence of SEQ ID NO:12
WHWLQLKPGQPMY

SEQ ID NO: 973 - protein, 13 aa, Saccharomyces cerevisiae
  REGION 1..13: note = Amino acid sequence of SEQ ID NO:13
WHWLNLRPGQPMY

SEQ ID NO: 974 - protein, 13 aa, Saccharomyces cerevisiae
  REGION 1..13: note = Amino acid sequence of SEQ ID NO:14
WHWLQLKPGQPMY

SEQ ID NO: 975 - protein, 13 aa, Saccharomyces cerevisiae
  REGION 1..13: note = Amino acid sequence of SEQ ID NO:15
WHWLNLRPGQPMY

SEQ ID NO: 976 - protein, 13 aa, Saccharomyces cerevisiae
  REGION 1..13: note = Amino acid sequence of SEQ ID NO:16
WHWLQLKPGQPMY

SEQ ID NO: 977 - protein, 13 aa, Saccharomyces cerevisiae
  REGION 1..13: note = Amino acid sequence of SEQ ID NO:17
WHWLNLRPGQPMY

SEQ ID NO: 978 - protein, 13 aa, Saccharomyces cerevisiae
  REGION 1..13: note = Amino acid sequence of SEQ ID NO:18
WHWLQLKPGQPMY

SEQ ID NO: 979 - protein, 13 aa, Saccharomyces cerevisiae
  REGION 1..13: note = Amino acid sequence of SEQ ID NO:19
WHWLNLRPGQPMY

SEQ ID NO: 980 - protein, 13 aa, Saccharomyces cerevisiae
  REGION 1..13: note = Amino acid sequence of SEQ ID NO:20
WHWLQLKPGQPMY

SEQ ID NO: 981 - protein, 13 aa, Saccharomyces cerevisiae
  REGION 1..13: note = Amino acid sequence of SEQ ID NO:21
WHWLNLRPGQPMY

SEQ ID NO: 982 - protein, 13 aa, Saccharomyces cerevisiae
  REGION 1..13: note = Amino acid sequence of SEQ ID NO:22
WHWLQLKPGQPMY

SEQ ID NO: 983 - protein, 13 aa, Saccharomyces cerevisiae
  REGION 1..13: note = Amino acid sequence of SEQ ID NO:23
WHWLNLRPGQPMY

SEQ ID NO: 984 - protein, 13 aa, Saccharomyces cerevisiae
  REGION 1..13: note = Amino acid sequence of SEQ ID NO:24
WHWLQLKPGQPMY

SEQ ID NO: 985 - protein, 13 aa, Saccharomyces cerevisiae
  REGION 1..13: note = Amino acid sequence of SEQ ID NO:25
WHWLNLRPGQPMY

SEQ ID NO: 986 - protein, 13 aa, Saccharomyces cerevisiae
  REGION 1..13: note = Amino acid sequence of SEQ ID NO:26
WHWLQLKPGQPMY

SEQ ID NO: 987 - protein, 13 aa, Saccharomyces cerevisiae
  REGION 1..13: note = Amino acid sequence of SEQ ID NO:27
WHWLNLRPGQPMY

SEQ ID NO: 988 - protein, 13 aa, Saccharomyces cerevisiae
  REGION 1..13: note = Amino acid sequence of SEQ ID NO:28
WHWLQLKPGQPMY

SEQ ID NO: 989 - protein, 13 aa, Saccharomyces cerevisiae
  REGION 1..13: note = Amino acid sequence of SEQ ID NO:29
WHWLNLRPGQPMY

SEQ ID NO: 990 - protein, 13 aa, Saccharomyces cerevisiae
  REGION 1..13: note = Amino acid sequence of SEQ ID NO:30
WHWLQLKPGQPMY

SEQ ID NO: 991 - protein, 13 aa, Saccharomyces cerevisiae
  REGION 1..13: note = Amino acid sequence of SEQ ID NO:31
WHWLNLRPGQPMY

SEQ ID NO: 992 - protein, 13 aa, Saccharomyces cerevisiae
  REGION 1..13: note = Amino acid sequence of SEQ ID NO:32
WHWLQLKPGQPMY

SEQ ID NO: 993 - protein, 13 aa, Saccharomyces cerevisiae
  REGION 1..13: note = Amino acid sequence of SEQ ID NO:33
WHWLNLRPGQPMY

SEQ ID NO: 994 - protein, 13 aa, Saccharomyces cerevisiae
  REGION 1..13: note = Amino acid sequence of SEQ ID NO:34
WHWLQLKPGQPMY

SEQ ID NO: 995 - protein, 13 aa, Saccharomyces cerevisiae
  REGION 1..13: note = Amino acid sequence of SEQ ID NO:35
WHWLNLRPGQPMY

SEQ ID NO: 996 - protein, 13 aa, Saccharomyces cerevisiae
  REGION 1..13: note = Amino acid sequence of SEQ ID NO:36
WHWLQLKPGQPMY

SEQ ID NO: 997 - protein, 13 aa, Saccharomyces cerevisiae
  REGION 1..13: note = Amino acid sequence of SEQ ID NO:37
WHWLNLRPGQPMY

SEQ ID NO: 998 - protein, 13 aa, Saccharomyces cerevisiae
  REGION 1..13: note = Amino acid sequence of SEQ ID NO:38
WHWLQLKPGQPMY

SEQ ID NO: 999 - protein, 13 aa, Saccharomyces cerevisiae
  REGION 1..13: note = Amino acid sequence of SEQ ID NO:39
WHWLNLRPGQPMY

SEQ ID NO: 1000 - protein, 13 aa, Saccharomyces cerevisiae
  REGION 1..13: note = Amino acid sequence of SEQ ID NO:40
WHWLQLKPGQPMY

SEQ ID NO: 1001 - protein, 13 aa, Saccharomyces cerevisiae
  REGION 1..13: note = Amino acid sequence of SEQ ID NO:41
WHWLNLRPGQPMY

SEQ ID NO: 1002 - protein, 13 aa, Saccharomyces cerevisiae
  REGION 1..13: note = Amino acid sequence of SEQ ID NO:42
WHWLQLKPGQPMY

SEQ ID NO: 1003 - protein, 13 aa, Saccharomyces cerevisiae
  REGION 1..13: note = Amino acid sequence of SEQ ID NO:43
WHWLNLRPGQPMY

SEQ ID NO: 1004 - protein, 13 aa, Saccharomyces cerevisiae
  REGION 1..13: note = Amino acid sequence of SEQ ID NO:44
WHWLQLKPGQPMY

SEQ ID NO: 1005 - protein, 13 aa, Saccharomyces cerevisiae
  REGION 1..13: note = Amino acid sequence of SEQ ID NO:45
WHWLNLRPGQPMY

SEQ ID NO: 1006 - protein, 13 aa, Saccharomyces cerevisiae
  REGION 1..13: note = Amino acid sequence of SEQ ID NO:46
WHWLQLKPGQPMY

SEQ ID NO: 1007 - protein, 13 aa, Saccharomyces cerevisiae
  REGION 1..13: note = Amino acid sequence of SEQ ID NO:47
WHWLNLRPGQPMY

SEQ ID NO: 1008 - protein, 13 aa, Saccharomyces cerevisiae
  REGION 1..13: note = Amino acid sequence of SEQ ID NO:48
WHWLQLKPGQPMY

SEQ ID NO: 1009 - protein, 13 aa, Saccharomyces cerevisiae
  REGION 1..13: note = Amino acid sequence of SEQ ID NO:49
WHWLNLRPGQPMY

SEQ ID NO: 1010 - protein, 13 aa, Saccharomyces cerevisiae
  REGION 1..13: note = Amino acid sequence of SEQ ID NO:50
WHWLQLKPGQPMY

SEQ ID NO: 1011 - protein, 13 aa, Saccharomyces cerevisiae
  REGION 1..13: note = Amino acid sequence of SEQ ID NO:51
WHWLNLRPGQPMY

SEQ ID NO: 1012 - protein, 13 aa, Saccharomyces cerevisiae
  REGION 1..13: note = Amino acid sequence of SEQ ID NO:52
WHWLQLKPGQPMY

SEQ ID NO: 1013 - protein, 13 aa, Saccharomyces cerevisiae
  REGION 1..13: note = Amino acid sequence of SEQ ID NO:53
WHWLNLRPGQPMY

SEQ ID NO: 1014 - protein, 13 aa, Saccharomyces cerevisiae
  REGION 1..13: note = Amino acid sequence of SEQ ID NO:54
WHWLQLKPGQPMY

SEQ ID NO: 1015 - protein, 13 aa, Saccharomyces cerevisiae
  REGION 1..13: note = Amino acid sequence of SEQ ID NO:55
WHWLNLRPGQPMY

SEQ ID NO: 1016 - protein, 13 aa, Saccharomyces cerevisiae
  REGION 1..13: note = Amino acid sequence of SEQ ID NO:56
WHWLQLKPGQPMY

SEQ ID NO: 1017 - protein, 13 aa, Saccharomyces cerevisiae
  REGION 1..13: note = Amino acid sequence of SEQ ID NO:57
WHWLNLRPGQPMY

SEQ ID NO: 1018 - protein, 13 aa, Saccharomyces cerevisiae
  REGION 1..13: note = Amino acid sequence of SEQ ID NO:58
WHWLQLKPGQPMY

SEQ ID NO: 1019 - protein, 13 aa, Saccharomyces cerevisiae
  REGION 1..13: note = Amino acid sequence of SEQ ID NO:59
WHWLNLRPGQPMY

SEQ ID NO: 1020 - protein, 13 aa, Saccharomyces cerevisiae
  REGION 1..13: note = Amino acid sequence of SEQ ID NO:60
WHWLQLKPGQPMY

SEQ ID NO: 1021 - protein, 13 aa, Saccharomyces cerevisiae
  REGION 1..13: note = Amino acid sequence of SEQ ID NO:61
WHWLNLRPGQPMY

SEQ ID NO: 1022 - protein, 13 aa, Saccharomyces cerevisiae
  REGION 1..13: note = Amino acid sequence of SEQ ID NO:62
WHWLQLKPGQPMY

SEQ ID NO: 1023 - protein, 13 aa, Saccharomyces cerevisiae
  REGION 1..13: note = Amino acid sequence of SEQ ID NO:63
WHWLNLRPGQPMY

SEQ ID NO: 1024 - protein, 13 aa, Saccharomyces cerevisiae
  REGION 1..13: note = Amino acid sequence of SEQ ID NO:64
WHWLQLKPGQPMY

SEQ ID NO: 1025 - protein, 13 aa, Saccharomyces cerevisiae
  REGION 1..13: note = Amino acid sequence of SEQ ID NO:65
WHWLNLRPGQPMY

SEQ ID NO: 1026 - protein, 13 aa, Saccharomyces cerevisiae
  REGION 1..13: note = Amino acid sequence of SEQ ID NO:66
WHWLQLKPGQPMY

SEQ ID NO: 1027 - protein, 13 aa, Saccharomyces cerevisiae
  REGION 1..13: note = Amino acid sequence of SEQ ID NO:67
WHWLNLRPGQPMY

SEQ ID NO: 1028 - protein, 13 aa, Saccharomyces cerevisiae
  REGION 1..13: note = Amino acid sequence of SEQ ID NO:68
WHWLQLKPGQPMY

SEQ ID NO: 1029 - protein, 13 aa, Saccharomyces cerevisiae
  REGION 1..13: note = Amino acid sequence of SEQ ID NO:69
WHWLNLRPGQPMY

SEQ ID NO: 1030 - protein, 13 aa, Saccharomyces cerevisiae
  REGION 1..13: note = Amino acid sequence of SEQ ID NO:70
WHWLQLKPGQPMY

SEQ ID NO: 1031 - protein, 13 aa, Saccharomyces cerevisiae
  REGION 1..13: note = Amino acid sequence of SEQ ID NO:71
WHWLNLRPGQPMY

SEQ ID NO: 1032 - protein, 13 aa, Saccharomyces cerevisiae
  REGION 1..13: note = Amino acid sequence of SEQ ID NO:72
WHWLQLKPGQPMY

SEQ ID NO: 1033 - protein, 13 aa, Saccharomyces cerevisiae
  REGION 1..13: note = Amino acid sequence of SEQ ID NO:73
WHWLNLRPGQPMY

SEQ ID NO: 1034 - protein, 13 aa, Saccharomyces cerevisiae
  REGION 1..13: note = Amino acid sequence of SEQ ID NO:74
WHWLQLKPGQPMY

SEQ ID NO: 1035 - protein, 13 aa, Saccharomyces cerevisiae
  REGION 1..13: note = Amino acid sequence of SEQ ID NO:75
WHWLNLRPGQPMY

SEQ ID NO: 1036 - protein, 13 aa, Saccharomyces cerevisiae
  REGION 1..13: note = Amino acid sequence of SEQ ID NO:76
WHWLQLKPGQPMY

SEQ ID NO: 1037 - protein, 13 aa, Saccharomyces cerevisiae
  REGION 1..13: note = Amino acid sequence of SEQ ID NO:77
WHWLNLRPGQPMY

SEQ ID NO: 1038 - protein, 13 aa, Saccharomyces cerevisiae
  REGION 1..13: note = Amino acid sequence of SEQ ID NO:78
WHWLQLKPGQPMY

SEQ ID NO: 1039 - protein, 13 aa, Saccharomyces cerevisiae
  REGION 1..13: note = Amino acid sequence of SEQ ID NO:79
WHWLNLRPGQPMY

SEQ ID NO: 1040 - protein, 13 aa, Saccharomyces cerevisiae
  REGION 1..13: note = Amino acid sequence of SEQ ID NO:80
WHWLQLKPGQPMY

SEQ ID NO: 1041 - protein, 13 aa, Saccharomyces cerevisiae
  REGION 1..13: note = Amino acid sequence of SEQ ID NO:81
WHWLNLRPGQPMY

SEQ ID NO: 1042 - protein, 13 aa, Saccharomyces cerevisiae
  REGION 1..13: note = Amino acid sequence of SEQ ID NO:82
WHWLQLKPGQPMY

SEQ ID NO: 1043 - protein, 13 aa, Saccharomyces cerevisiae
  REGION 1..13: note = Amino acid sequence of SEQ ID NO:83
WHWLNLRPGQPMY

SEQ ID NO: 1044 - protein, 13 aa, Saccharomyces cerevisiae
  REGION 1..13: note = Amino acid sequence of SEQ ID NO:84
WHWLQLKPGQPMY

SEQ ID NO: 1045 - protein, 13 aa, Saccharomyces cerevisiae
  REGION 1..13: note = Amino acid sequence of SEQ ID NO:85
WHWLNLRPGQPMY

SEQ ID NO: 1046 - protein, 13 aa, Saccharomyces cerevisiae
  REGION 1..13: note = Amino acid sequence of SEQ ID NO:86
WHWLQLKPGQPMY

SEQ ID NO: 1047 - protein, 13 aa, Saccharomyces cerevisiae
  REGION 1..13: note = Amino acid sequence of SEQ ID NO:87
WHWLNLRPGQPMY

SEQ ID NO: 1048 - protein, 13 aa, Saccharomyces cerevisiae
  REGION 1..13: note = Amino acid sequence of SEQ ID NO:88
WHWLQLKPGQPMY

SEQ ID NO: 1049 - protein, 13 aa, Saccharomyces cerevisiae
  REGION 1..13: note = Amino acid sequence of SEQ ID NO:89
WHWLNLRPGQPMY

SEQ ID NO: 1050 - protein, 13 aa, Saccharomyces cerevisiae
  REGION 1..13: note = Amino acid sequence of SEQ ID NO:90
WHWLQLKPGQPMY

SEQ ID NO: 1051 - protein, 13 aa, Saccharomyces cerevisiae
  REGION 1..13: note = Amino acid sequence of SEQ ID NO:91
WHWLNLRPGQPMY

SEQ ID NO: 1052 - protein, 13 aa, Saccharomyces cerevisiae
  REGION 1..13: note = Amino acid sequence of SEQ ID NO:92
WHWLQLKPGQPMY

SEQ ID NO: 1053 - protein, 13 aa, Saccharomyces cerevisiae
  REGION 1..13: note = Amino acid sequence of SEQ ID NO:93
WHWLNLRPGQPMY

SEQ ID NO: 1054 - protein, 13 aa, Saccharomyces cerevisiae
  REGION 1..13: note = Amino acid sequence of SEQ ID NO:94
WHWLQLKPGQPMY

SEQ ID NO: 1055 - protein, 13 aa, Saccharomyces cerevisiae
  REGION 1..13: note = Amino acid sequence of SEQ ID NO:95
WHWLNLRPGQPMY

SEQ ID NO: 1056 - protein, 13 aa, Saccharomyces cerevisiae
  REGION 1..13: note = Amino acid sequence of SEQ ID NO:96
WHWLQLKPGQPMY

SEQ ID NO: 1057 - protein, 13 aa, Saccharomyces cerevisiae
  REGION 1..13: note = Amino acid sequence of SEQ ID NO:97
WHWLNLRPGQPMY

SEQ ID NO: 1058 - protein, 13 aa, Saccharomyces cerevisiae
  REGION 1..13: note = Amino acid sequence of SEQ ID NO:98
WHWLQLKPGQPMY

SEQ ID NO: 1059 - protein, 13 aa, Saccharomyces cerevisiae
  REGION 1..13: note = Amino acid sequence of SEQ ID NO:99
WHWLNLRPGQPMY

SEQ ID NO: 1060 - protein, 13 aa, Saccharomyces cerevisiae
  REGION 1..13: note = Amino acid sequence of SEQ ID NO:100
WHWLQLKPGQPMY

SEQ ID NO: 1061 - protein, 13 aa, Saccharomyces cerevisiae
  REGION 1..13: note = Amino acid sequence of SEQ ID NO:101
WHWLNLRPGQPMY

SEQ ID NO: 1062 - protein, 13 aa, Saccharomyces cerevisiae
  REGION 1..13: note = Amino acid sequence of SEQ ID NO:102
WHWLQLKPGQPMY

SEQ ID NO: 1063 - protein, 13 aa, Saccharomyces cerevisiae
  REGION 1..13: note = Amino acid sequence of SEQ ID NO:103
WHWLNLRPGQPMY

SEQ ID NO: 1064 - protein, 13 aa, Saccharomyces cerevisiae
  REGION 1..13: note = Amino acid sequence of SEQ ID NO:104
WHWLQLKPGQPMY

SEQ ID NO: 1065 - protein, 13 aa, Saccharomyces cerevisiae
  REGION 1..13: note = Amino acid sequence of SEQ ID NO:105
WHWLNLRPGQPMY

SEQ ID NO: 1066 - protein, 13 aa, Saccharomyces cerevisiae
  REGION 1..13: note = Amino acid sequence of SEQ ID NO:106
WHWLQLKPGQPMY

SEQ ID NO: 1067 - protein, 13 aa, Saccharomyces cerevisiae
  REGION 1..13: note = Amino acid sequence of SEQ ID NO:107
WHWLNLRPGQPMY

SEQ ID NO: 1068 - protein, 13 aa, Saccharomyces cerevisiae
  REGION 1..13: note = Amino acid sequence of SEQ ID NO:108
WHWLQLKPGQPMY

SEQ ID NO: 1069 - protein, 13 aa, Saccharomyces cerevisiae
  REGION 1..13: note = Amino acid sequence of SEQ ID NO:109
WHWLNLRPGQPMY

SEQ ID NO: 1070 - protein, 13 aa, Saccharomyces cerevisiae
  REGION 1..13: note = Amino acid sequence of SEQ ID NO:110
WHWLQLKPGQPMY

SEQ ID NO: 1071 - protein, 13 aa, Saccharomyces cerevisiae
  REGION 1..13: note = Amino acid sequence of SEQ ID NO:111
WHWLNLRPGQPMY

SEQ ID NO: 1072 - protein, 13 aa, Saccharomyces cerevisiae
  REGION 1..13: note = Amino acid sequence of SEQ ID NO:112
WHWLQLKPGQPMY

SEQ ID NO: 1073 - protein, 13 aa, Saccharomyces cerevisiae
  REGION 1..13: note = Amino acid sequence of SEQ ID NO:113
WHWLNLRPGQPMY

SEQ ID NO: 1074 - protein, 13 aa, Saccharomyces cerevisiae
  REGION 1..13: note = Amino acid sequence of SEQ ID NO:114
WHWLQLKPGQPMY

SEQ ID NO: 1075 - protein, 13 aa, Saccharomyces cerevisiae
  REGION 1..13: note = Amino acid sequence of SEQ ID NO:115
WHWLNLRPGQPMY

SEQ ID NO: 1076 - protein, 13 aa, Saccharomyces cerevisiae
  REGION 1..13: note = Amino acid sequence of SEQ ID NO:116
WHWLQLKPGQPMY

SEQ ID NO: 1077 - protein, 13 aa, Saccharomyces cerevisiae
  REGION 1..13: note = Amino acid sequence of SEQ ID NO:117
WHWLNLRPGQPMY

SEQ ID NO: 1078 - protein, 13 aa, Saccharomyces cerevisiae
  REGION 1..13: note = Amino acid sequence of SEQ ID NO:118
WHWLQLKPGQPMY

SEQ ID NO: 1079 - protein, 13 aa, Saccharomyces cerevisiae
  REGION 1..13: note = Amino acid sequence of SEQ ID NO:119
WHWLNLRPGQPMY

SEQ ID NO: 1080 - protein, 13 aa, Saccharomyces cerevisiae
  REGION 1..13: note = Amino acid sequence of SEQ ID NO:120
WHWLQLKPGQPMY

SEQ ID NO: 1081 - protein, 13 aa, Saccharomyces cerevisiae
  REGION 1..13: note = Amino acid sequence of SEQ ID NO:121
WHWLNLRPGQPMY

SEQ ID NO: 1082 - protein, 13 aa, Saccharomyces cerevisiae
  REGION 1..13: note = Amino acid sequence of SEQ ID NO:122
WHWLQLKPGQPMY

SEQ ID NO: 1083 - protein, 13 aa, Saccharomyces cerevisiae
  REGION 1..13: note = Amino acid sequence of SEQ ID NO:123
WHWLNLRPGQPMY

SEQ ID NO: 1084 - protein, 13 aa, Saccharomyces cerevisiae
  REGION 1..13: note = Amino acid sequence of SEQ ID NO:124
WHWLQLKPGQPMY

SEQ ID NO: 1085 - protein, 13 aa, Saccharomyces cerevisiae
  REGION 1..13: note = Amino acid sequence of SEQ ID NO:125
WHWLNLRPGQPMY

SEQ ID NO: 1086 - protein, 13 aa, Saccharomyces cerevisiae
  REGION 1..13: note = Amino acid sequence of SEQ ID NO:126
WHWLQLKPGQPMY

SEQ ID NO: 1087 - protein, 13 aa, Saccharomyces cerevisiae
  REGION 1..13: note = Amino acid sequence of SEQ ID NO:127
WHWLNLRPGQPMY

SEQ ID NO: 1088 - protein, 13 aa, Saccharomyces cerevisiae
  REGION 1..13: note = Amino acid sequence of SEQ ID NO:128
WHWLQLKPGQPMY

SEQ ID NO: 1089 - protein, 13 aa, Saccharomyces cerevisiae
  REGION 1..13: note = Amino acid sequence of SEQ ID NO:129
WHWLNLRPGQPMY

SEQ ID NO: 1090 - protein, 13 aa, Saccharomyces cerevisiae
  REGION 1..13: note = Amino acid sequence of SEQ ID NO:130
WHWLQLKPGQPMY

SEQ ID NO: 1091 - protein, 13 aa, Saccharomyces cerevisiae
  REGION 1..13: note = Amino acid sequence of SEQ ID NO:131
WHWLNLRPGQPMY

SEQ ID NO: 1092 - protein, 13 aa, Saccharomyces cerevisiae
  REGION 1..13: note = Amino acid sequence of SEQ ID NO:132
WHWLQLKPGQPMY

SEQ ID NO: 1093 - protein, 13 aa, Saccharomyces cerevisiae
  REGION 1..13: note = Amino acid sequence of SEQ ID NO:133
WHWLNLRPGQPMY

SEQ ID NO: 1094 - protein, 13 aa, Saccharomyces cerevisiae
  REGION 1..13: note = Amino acid sequence of SEQ ID NO:134
WHWLQLKPGQPMY

SEQ ID NO: 1095 - protein, 13 aa, Saccharomyces cerevisiae
  REGION 1..13: note = Amino acid sequence of SEQ ID NO:135
WHWLNLRPGQPMY

SEQ ID NO: 1096 - protein, 13 aa, Saccharomyces cerevisiae
  REGION 1..13: note = Amino acid sequence of SEQ ID NO:136
WHWLQLKPGQPMY

SEQ ID NO: 1097 - protein, 13 aa, Saccharomyces cerevisiae
  REGION 1..13: note = Amino acid sequence of SEQ ID NO:137
WHWLNLRPGQPMY

SEQ ID NO: 1098 - protein, 13 aa, Saccharomyces cerevisiae
  REGION 1..13: note = Amino acid sequence of SEQ ID NO:138
WHWLQLKPGQPMY

SEQ ID NO: 1099 - protein, 13 aa, Saccharomyces cerevisiae
  REGION 1..13: note = Amino acid sequence of SEQ ID NO:139
WHWLNLRPGQPMY

SEQ ID NO: 1100 - protein, 13 aa, Saccharomyces cerevisiae
  REGION 1..13: note = Amino acid sequence of SEQ ID NO:140
WHWLQLKPGQPMY

SEQ ID NO: 1101 - protein, 13 aa, Saccharomyces cerevisiae
  REGION 1..13: note = Amino acid sequence of SEQ ID NO:141
WHWLNLRPGQPMY

SEQ ID NO: 1102 - protein, 13 aa, Saccharomyces cerevisiae
  REGION 1..13: note = Amino acid sequence of SEQ ID NO:142
WHWLQLKPGQPMY

SEQ ID NO: 1103 - protein, 13 aa, Saccharomyces cerevisiae
  REGION 1..13: note = Amino acid sequence of SEQ ID NO:143
WHWLNLRPGQPMY

SEQ ID NO: 1104 - protein, 13 aa, Saccharomyces cerevisiae
  REGION 1..13: note = Amino acid sequence of SEQ ID NO:144
WHWLQLKPGQPMY

SEQ ID NO: 1105 - protein, 13 aa, Saccharomyces cerevisiae
  REGION 1..13: note = Amino acid sequence of SEQ ID NO:145
WHWLNLRPGQPMY

SEQ ID NO: 1106 - protein, 13 aa, Saccharomyces cerevisiae
  REGION 1..13: note = Amino acid sequence of SEQ ID NO:146
WHWLQLKPGQPMY

SEQ ID NO: 1107 - protein, 13 aa, Saccharomyces cerevisiae
  REGION 1..13: note = Amino acid sequence of SEQ ID NO:147
WHWLNLRPGQPMY

SEQ ID NO: 1108 - protein, 13 aa, Saccharomyces cerevisiae
  REGION 1..13: note = Amino acid sequence of SEQ ID NO:148
WHWLQLKPGQPMY

SEQ ID NO: 1109 - protein, 13 aa, Saccharomyces cerevisiae
  REGION 1..13: note = Amino acid sequence of SEQ ID NO:149
WHWLNLRPGQPMY

SEQ ID NO: 1110 - protein, 13 aa, Saccharomyces cerevisiae
  REGION 1..13: note = Amino acid sequence of SEQ ID NO:150
WHWLQLKPGQPMY

SEQ ID NO: 1111 - protein, 13 aa, Saccharomyces cerevisiae
  REGION 1..13: note = Amino acid sequence of SEQ ID NO:151
WHWLNLRPGQPMY

SEQ ID NO: 1112 - protein, 13 aa, Saccharomyces cerevisiae
  REGION 1..13: note = Amino acid sequence of SEQ ID NO:152
WHWLQLKPGQPMY

SEQ ID NO: 1113 - protein, 13 aa, Saccharomyces cerevisiae
  REGION 1..13: note = Amino acid sequence of SEQ ID NO:153
WHWLNLRPGQPMY

SEQ ID NO: 1114 - protein, 13 aa, Saccharomyces cerevisiae
  REGION 1..13: note = Amino acid sequence of SEQ ID NO:154
WHWLQLKPGQPMY

SEQ ID NO: 1115 - protein, 13 aa, Saccharomyces cerevisiae
  REGION 1..13: note = Amino acid sequence of SEQ ID NO:155
WHWLNLRPGQPMY

SEQ ID NO: 1116 - protein, 13 aa, Saccharomyces cerevisiae
  REGION 1..13: note = Amino acid sequence of SEQ ID NO:156
WHWLQLKPGQPMY

SEQ ID NO: 1117 - protein, 13 aa, Saccharomyces cerevisiae
  REGION 1..13: note = Amino acid sequence of SEQ ID NO:157
WHWLNLRPGQPMY

SEQ ID NO: 1118 - protein, 13 aa, Saccharomyces cerevisiae
  REGION 1..13: note = Amino acid sequence of SEQ ID NO:158
WHWLQLKPGQPMY

SEQ ID NO: 1119 - protein, 13 aa, Saccharomyces cerevisiae
  REGION 1..13: note = Amino acid sequence of SEQ ID NO:159
WHWLNLRPGQPMY

SEQ ID NO: 1120 - protein, 13 aa, Saccharomyces cerevisiae
  REGION 1..13: note = Amino acid sequence of SEQ ID NO:160
WHWLQLKPGQPMY

SEQ ID NO: 1121 - protein, 13 aa, Saccharomyces cerevisiae
  REGION 1..13: note = Amino acid sequence of SEQ ID NO:161
WHWLNLRPGQPMY

SEQ ID NO: 1122 - protein, 13 aa, Saccharomyces cerevisiae
  REGION 1..13: note = Amino acid sequence of SEQ ID NO:162
WHWLQLKPGQPMY

SEQ ID NO: 1123 - protein, 13 aa, Saccharomyces cerevisiae
  REGION 1..13: note = Amino acid sequence of SEQ ID NO:163
WHWLNLRPGQPMY

SEQ ID NO: 1124 - protein, 13 aa, Saccharomyces cerevisiae
  REGION 1..13: note = Amino acid sequence of SEQ ID NO:164
WHWLQLKPGQPMY

SEQ ID NO: 1125 - protein, 13 aa, Saccharomyces cerevisiae
  REGION 1..13: note = Amino acid sequence of SEQ ID NO:165
WHWLNLRPGQPMY

SEQ ID NO: 1126 - protein, 13 aa, Saccharomyces cerevisiae
  REGION 1..13: note = Amino acid sequence of SEQ ID NO:166
WHWLQLKPGQPMY

SEQ ID NO: 1127 - protein, 13 aa, Saccharomyces cerevisiae
  REGION 1..13: note = Amino acid sequence of SEQ ID NO:167
WHWLNLRPGQPMY

SEQ ID NO: 1128 - protein, 13 aa, Saccharomyces cerevisiae
  REGION 1..13: note = Amino acid sequence of SEQ ID NO:168
WHWLQLKPGQPMY

SEQ ID NO: 1129 - protein, 13 aa, Saccharomyces cerevisiae
  REGION 1..13: note = Amino acid sequence of SEQ ID NO:169
WHWLNLRPGQPMY

SEQ ID NO: 1130 - protein, 13 aa, Saccharomyces cerevisiae
  REGION 1..13: note = Amino acid sequence of SEQ ID NO:170
WHWLQLKPGQPMY

SEQ ID NO: 1131 - protein, 13 aa, Saccharomyces cerevisiae
  REGION 1..13: note = Amino acid sequence of SEQ ID NO:171
WHWLNLRPGQPMY

SEQ ID NO: 1132 - protein, 13 aa, Saccharomyces cerevisiae
  REGION 1..13: note = Amino acid sequence of SEQ ID NO:172
WHWLQLKPGQPMY

SEQ ID NO: 1133 - protein, 13 aa, Saccharomyces cerevisiae
  REGION 1..13: note = Amino acid sequence of SEQ ID NO:173
WHWLNLRPGQPMY

SEQ ID NO: 1134 - protein, 13 aa, Saccharomyces cerevisiae
  REGION 1..13: note = Amino acid sequence of SEQ ID NO:174
WHWLQLKPGQPMY

SEQ ID NO: 1135 - protein, 13 aa, Saccharomyces cerevisiae
  REGION 1..13: note = Amino acid sequence of SEQ ID NO:175
WHWLNLRPGQPMY

SEQ ID NO: 1136 - protein, 13 aa, Saccharomyces cerevisiae
  REGION 1..13: note = Amino acid sequence of SEQ ID NO:176
WHWLQLKPGQPMY

SEQ ID NO: 1137 - protein, 13 aa, Saccharomyces cerevisiae
  REGION 1..13: note = Amino acid sequence of SEQ ID NO:177
WHWLNLRPGQPMY

SEQ ID NO: 1138 - protein, 13 aa, Saccharomyces cerevisiae
  REGION 1..13: note = Amino acid sequence of SEQ ID NO:178
WHWLQLKPGQPMY

SEQ ID NO: 1139 - protein, 13 aa, Saccharomyces cerevisiae
  REGION 1..13: note = Amino acid sequence of SEQ ID NO:179
WHWLNLRPGQPMY

SEQ ID NO: 1140 - protein, 13 aa, Saccharomyces cerevisiae
  REGION 1..13: note = Amino acid sequence of SEQ ID NO:180
WHWLQLKPGQPMY

SEQ ID NO: 1141 - protein, 13 aa, Saccharomyces cerevisiae
  REGION 1..13: note = Amino acid sequence of SEQ ID NO:181
WHWLNLRPGQPMY

SEQ ID NO: 1142 - protein, 13 aa, Saccharomyces cerevisiae
  REGION 1..13: note = Amino acid sequence of SEQ ID NO:182
WHWLQLKPGQPMY

SEQ ID NO: 1143 - protein, 13 aa, Saccharomyces cerevisiae
  REGION 1..13: note = Amino acid sequence of SEQ ID NO:183
WHWLQLKPGQPMY

SEQ ID NO: 1144 - protein, 13 aa, Saccharomyces cerevisiae
  REGION 1..13: note = Amino acid sequence of SEQ ID NO:184
WHWLQLKPGQPMY

SEQ ID NO: 1145 - protein, 13 aa, Saccharomyces cerevisiae
  REGION 1..13: note = Amino acid sequence of SEQ ID NO:185
WHWLQLKPGQPMY

SEQ ID NO: 1146 - protein, 13 aa, Saccharomyces cerevisiae
  REGION 1..13: note = Amino acid sequence of SEQ ID NO:186
WHWLQLKPGQPMY

SEQ ID NO: 1147 - protein, 13 aa, Saccharomyces cerevisiae
  REGION 1..13: note = Amino acid sequence of SEQ ID NO:187
WHWLQLKPGQPMY

SEQ ID NO: 1148 - protein, 13 aa, Saccharomyces cerevisiae
  REGION 1..13: note = Amino acid sequence of SEQ ID NO:188
WHWLQLKPGQPMY

SEQ ID NO: 1149 - protein, 13 aa, Saccharomyces cerevisiae
  REGION 1..13: note = Amino acid sequence of SEQ ID NO:189
WHWLQLKPGQPMY

SEQ ID NO: 1150 - protein, 13 aa, Saccharomyces cerevisiae
  REGION 1..13: note = Amino acid sequence of SEQ ID NO:190
WHWLQLKPGQPMY

SEQ ID NO: 1151 - protein, 13 aa, Saccharomyces cerevisiae
  REGION 1..13: note = Amino acid sequence of SEQ ID NO:191
WHWLQLKPGQPMY

SEQ ID NO: 1152 - protein, 13 aa, Saccharomyces cerevisiae
  REGION 1..13: note = Amino acid sequence of SEQ ID NO:192
WHWLQLKPGQPMY

SEQ ID NO: 1153 - protein, 13 aa, Saccharomyces cerevisiae
  REGION 1..13: note = Amino acid sequence of SEQ ID NO:193
WHWLQLKPGQPMY

SEQ ID NO: 1154 - protein, 13 aa, Saccharomyces cerevisiae
  REGION 1..13: note = Amino acid sequence of SEQ ID NO:194
WHWLQLKPGQPMY

SEQ ID NO: 1155 - protein, 13 aa, Saccharomyces cerevisiae
  REGION 1..13: note = Amino acid sequence of SEQ ID NO:195
WHWLQLKPGQPMY

SEQ ID NO: 1156 - protein, 13 aa, Saccharomyces cerevisiae
  REGION 1..13: note = Amino acid sequence of SEQ ID NO:196
WHWLQLKPGQPMY

SEQ ID NO: 1157 - protein, 13 aa, Saccharomyces cerevisiae
  REGION 1..13: note = Amino acid sequence of SEQ ID NO:197
WHWLQLKPGQPMY

SEQ ID NO: 1158 - protein, 13 aa, Saccharomyces cerevisiae
  REGION 1..13: note = Amino acid sequence of SEQ ID NO:198
WHWLQLKPGQPMY

SEQ ID NO: 1159 - protein, 13 aa, Saccharomyces cerevisiae
  REGION 1..13: note = Amino acid sequence of SEQ ID NO:199
WHWLQLKPGQPMY

SEQ ID NO: 1160 - protein, 13 aa, Saccharomyces cerevisiae
  REGION 1..13: note = Amino acid sequence of SEQ ID NO:200
WHWLQLKPGQPMY

SEQ ID NO: 1161 - protein, 13 aa, Saccharomyces cerevisiae
  REGION 1..13: note = Amino acid sequence of SEQ ID NO:201
WHWLQLKPGQPMY

SEQ ID NO: 1162 - protein, 13 aa, Saccharomyces cerevisiae
  REGION 1..13: note = Amino acid sequence of SEQ ID NO:202
WHWLRLKPGQPMY

SEQ ID NO: 1163 - protein, 13 aa, Saccharomyces cerevisiae
  REGION 1..13: note = Amino acid sequence of SEQ ID NO:203
WHWLQLKPGQPMY

SEQ ID NO: 1164 - protein, 13 aa, Saccharomyces cerevisiae
  REGION 1..13: note = Amino acid sequence of SEQ ID NO:204
WHWLQLKPGQPMY

SEQ ID NO: 1165 - protein, 13 aa, Saccharomyces cerevisiae
  REGION 1..13: note = Amino acid sequence of SEQ ID NO:205
WHWLQLKPGQPMY

SEQ ID NO: 1166 - protein, 13 aa, Saccharomyces cerevisiae
  REGION 1..13: note = Amino acid sequence of SEQ ID NO:206
WHWLQLKPGQPMY

SEQ ID NO: 1167 - protein, 13 aa, Saccharomyces cerevisiae
  REGION 1..13: note = Amino acid sequence of SEQ ID NO:207
WHWLQLKPGQPMY

SEQ ID NO: 1168 - protein, 13 aa, Saccharomyces cerevisiae
  REGION 1..13: note = Amino acid sequence of SEQ ID NO:208
WHWLQLKPGQPMY

SEQ ID NO: 1169 - protein, 13 aa, Saccharomyces cerevisiae
  REGION 1..13: note = Amino acid sequence of SEQ ID NO:209
WHWLQLKPGQPMY

SEQ ID NO: 1170 - protein, 13 aa, Saccharomyces cerevisiae
  REGION 1..13: note = Amino acid sequence of SEQ ID NO:210
WHWLQLKPGQPMY

SEQ ID NO: 1171 - protein, 13 aa, Saccharomyces cerevisiae
  REGION 1..13: note = Amino acid sequence of SEQ ID NO:211
WHWLQLKPGQPMY

SEQ ID NO: 1172 - protein, 13 aa, Saccharomyces cerevisiae
  REGION 1..13: note = Amino acid sequence of SEQ ID NO:212
WHWLQLKPGQPMY

SEQ ID NO: 1173 - protein, 13 aa, Saccharomyces cerevisiae
  REGION 1..13: note = Amino acid sequence of SEQ ID NO:213
WHWLQLKPGQPMY

SEQ ID NO: 1174 - protein, 13 aa, Saccharomyces cerevisiae
  REGION 1..13: note = Amino acid sequence of SEQ ID NO:214
WHWLQLKPGQPMY

SEQ ID NO: 1175 - protein, 13 aa, Saccharomyces cerevisiae
  REGION 1..13: note = Amino acid sequence of SEQ ID NO:215
WHWLQLKPGQPMY

SEQ ID NO: 1176 - protein, 13 aa, Saccharomyces cerevisiae
  REGION 1..13: note = Amino acid sequence of SEQ ID NO:216
WHWLQLKPGQPMY

SEQ ID NO: 1177 - protein, 13 aa, Saccharomyces cerevisiae
  REGION 1..13: note = Amino acid sequence of SEQ ID NO:217
WHWLQLKPGQPMY

SEQ ID NO: 1178 - protein, 13 aa, Saccharomyces cerevisiae
  REGION 1..13: note = Amino acid sequence of SEQ ID NO:218
WHWLQLKPGQPMY

SEQ ID NO: 1179 - protein, 13 aa, Saccharomyces cerevisiae
  REGION 1..13: note = Amino acid sequence of SEQ ID NO:219
WHWLQLKPGQPMY

SEQ ID NO: 1180 - protein, 13 aa, Saccharomyces cerevisiae
  REGION 1..13: note = Amino acid sequence of SEQ ID NO:220
WHWLQLKPGQPMY

SEQ ID NO: 1181 - protein, 13 aa, Saccharomyces cerevisiae
  REGION 1..13: note = Amino acid sequence of SEQ ID NO:221
WHWLQLKPGQPMY

SEQ ID NO: 1182 - protein, 13 aa, Saccharomyces cerevisiae
  REGION 1..13: note = Amino acid sequence of SEQ ID NO:222
WHWLRLKPGQPMY

SEQ ID NO: 1183 - protein, 13 aa, Saccharomyces cerevisiae
  REGION 1..13: note = Amino acid sequence of SEQ ID NO:223
WHWLQLKPGQPMY

SEQ ID NO: 1184 - protein, 13 aa, Saccharomyces cerevisiae
  REGION 1..13: note = Amino acid sequence of SEQ ID NO:224
WHWLQLKPGQPMY

SEQ ID NO: 1185 - protein, 13 aa, Saccharomyces cerevisiae
  REGION 1..13: note = Amino acid sequence of SEQ ID NO:225
WHWLQLKPGQPMY

SEQ ID NO: 1186 - protein, 13 aa, Saccharomyces cerevisiae
  REGION 1..13: note = Amino acid sequence of SEQ ID NO:226
WHWLQLKPGQPMY

SEQ ID NO: 1187 - protein, 13 aa, Saccharomyces cerevisiae
  REGION 1..13: note = Amino acid sequence of SEQ ID NO:227
WHWLQLKPGQPMY

SEQ ID NO: 1188 - protein, 13 aa, Saccharomyces cerevisiae
  REGION 1..13: note = Amino acid sequence of SEQ ID NO:228
WHWLQLKPGQPMY

SEQ ID NO: 1189 - protein, 13 aa, Saccharomyces cerevisiae
  REGION 1..13: note = Amino acid sequence of SEQ ID NO:229
WHWLQLKPGQPMY

SEQ ID NO: 1190 - protein, 13 aa, Saccharomyces cerevisiae
  REGION 1..13: note = Amino acid sequence of SEQ ID NO:230
WHWLQLKPGQPMY

SEQ ID NO: 1191 - protein, 13 aa, Saccharomyces cerevisiae
  REGION 1..13: note = Amino acid sequence of SEQ ID NO:231
WHWLQLKPGQPMY

SEQ ID NO: 1192 - protein, 13 aa, Saccharomyces cerevisiae
  REGION 1..13: note = Amino acid sequence of SEQ ID NO:232
WHWLQLKPGQPMY

SEQ ID NO: 1193 - protein, 13 aa, Saccharomyces cerevisiae
  REGION 1..13: note = Amino acid sequence of SEQ ID NO:233
WHWLQLKPGQPMY

SEQ ID NO: 1194 - protein, 13 aa, Saccharomyces cerevisiae
  REGION 1..13: note = Amino acid sequence of SEQ ID NO:234
WHWLQLKPGQPMY

SEQ ID NO: 1195 - protein, 13 aa, Saccharomyces cerevisiae
  REGION 1..13: note = Amino acid sequence of SEQ ID NO:235
WHWLQLKPGQPMY

SEQ ID NO: 1196 - protein, 13 aa, Saccharomyces cerevisiae
  REGION 1..13: note = Amino acid sequence of SEQ ID NO:236
WHWLQLKPGQPMY

SEQ ID NO: 1197 - protein, 13 aa, Saccharomyces cerevisiae
  REGION 1..13: note = Amino acid sequence of SEQ ID NO:237
WHWLQLKPGQPMY

SEQ ID NO: 1198 - protein, 13 aa, Saccharomyces cerevisiae
  REGION 1..13: note = Amino acid sequence of SEQ ID NO:238
WHWLQLKPGQPMY

SEQ ID NO: 1199 - protein, 13 aa, Saccharomyces cerevisiae
  REGION 1..13: note = Amino acid sequence of SEQ ID NO:239
WHWLQLKPGQPMY

SEQ ID NO: 1200 - protein, 13 aa, Saccharomyces cerevisiae
  REGION 1..13: note = Amino acid sequence of SEQ ID NO:240
WHWLQLKPGQPMY

SEQ ID NO: 1201 - protein, 13 aa, Saccharomyces cerevisiae
  REGION 1..13: note = Amino acid sequence of SEQ ID NO:241
WHWLQLKPGQPMY

SEQ ID NO: 1202 - protein, 13 aa, Saccharomyces cerevisiae
  REGION 1..13: note = Amino acid sequence of SEQ ID NO:242
WHWLQLKPGQPMY

SEQ ID NO: 1203 - protein, 13 aa, Saccharomyces cerevisiae
  REGION 1..13: note = Amino acid sequence of SEQ ID NO:243
WHWLQLKPGQPMY

SEQ ID NO: 1204 - protein, 13 aa, Saccharomyces cerevisiae
  REGION 1..13: note = Amino acid sequence of SEQ ID NO:244
WHWLQLKPGQPMY

SEQ ID NO: 1205 - protein, 13 aa, Saccharomyces cerevisiae
  REGION 1..13: note = Amino acid sequence of SEQ ID NO:245
WHWLQLKPGQPMY

SEQ ID NO: 1206 - protein, 13 aa, Saccharomyces cerevisiae
  REGION 1..13: note = Amino acid sequence of SEQ ID NO:246
WHWLQLKPGQPMY

SEQ ID NO: 1207 - protein, 13 aa, Saccharomyces cerevisiae
  REGION 1..13: note = Amino acid sequence of SEQ ID NO:247
WHWLQLKPGQPMY

SEQ ID NO: 1208 - protein, 13 aa, Saccharomyces cerevisiae
  REGION 1..13: note = Amino acid sequence of SEQ ID NO:248
WHWLQLKPGQPMY

SEQ ID NO: 1209 - protein, 13 aa, Saccharomyces cerevisiae
  REGION 1..13: note = Amino acid sequence of SEQ ID NO:249
WHWLQLKPGQPMY

SEQ ID NO: 1210 - protein, 13 aa, Saccharomyces cerevisiae
  REGION 1..13: note = Amino acid sequence of SEQ ID NO:250
WHWLQLKPGQPMY

SEQ ID NO: 1211 - protein, 13 aa, Saccharomyces cerevisiae
  REGION 1..13: note = Amino acid sequence of SEQ ID NO:251
WHWLQLKPGQPMY

SEQ ID NO: 1212 - protein, 13 aa, Saccharomyces cerevisiae
  REGION 1..13: note = Amino acid sequence of SEQ ID NO:252
WHWLQLKPGQPMY

SEQ ID NO: 1213 - protein, 13 aa, Saccharomyces cerevisiae
  REGION 1..13: note = Amino acid sequence of SEQ ID NO:253
WHWLQLKPGQPMY

SEQ ID NO: 1214 - protein, 13 aa, Saccharomyces cerevisiae
  REGION 1..13: note = Amino acid sequence of SEQ ID NO:254
WHWLQLKPGQPMY

SEQ ID NO: 1215 - protein, 13 aa, Saccharomyces cerevisiae
  REGION 1..13: note = Amino acid sequence of SEQ ID NO:255
WHWLQLKPGQPMY

SEQ ID NO: 1216 - protein, 13 aa, Saccharomyces cerevisiae
  REGION 1..13: note = Amino acid sequence of SEQ ID NO:256
WHWLQLKPGQPMY

SEQ ID NO: 1217 - protein, 13 aa, Saccharomyces cerevisiae
  REGION 1..13: note = Amino acid sequence of SEQ ID NO:257
WHWLQLKPGQPMY

SEQ ID NO: 1218 - protein, 13 aa, Saccharomyces cerevisiae
  REGION 1..13: note = Amino acid sequence of SEQ ID NO:258
WHWLQLKPGQPMY

SEQ ID NO: 1219 - protein, 13 aa, Saccharomyces cerevisiae
  REGION 1..13: note = Amino acid sequence of SEQ ID NO:259
WHWLQLKPGQPMY

SEQ ID NO: 1220 - protein, 13 aa, Saccharomyces cerevisiae
  REGION 1..13: note = Amino acid sequence of SEQ ID NO:260
WHWLQLKPGQPMY

SEQ ID NO: 1221 - protein, 13 aa, Saccharomyces cerevisiae
  REGION 1..13: note = Amino acid sequence of SEQ ID NO:261
WHWLQLKPGQPMY

SEQ ID NO: 1222 - protein, 13 aa, Saccharomyces cerevisiae
  REGION 1..13: note = Amino acid sequence of SEQ ID NO:262
WHWLQLKPGQPMY

SEQ ID NO: 1223 - protein, 13 aa, Saccharomyces cerevisiae
  REGION 1..13: note = Amino acid sequence of SEQ ID NO:263
WHWLQLKPGQPMY

SEQ ID NO: 1224 - protein, 13 aa, Saccharomyces cerevisiae
  REGION 1..13: note = Amino acid sequence of SEQ ID NO:264
WHWLQLKPGQPMY

SEQ ID NO: 1225 - protein, 13 aa, Saccharomyces cerevisiae
  REGION 1..13: note = Amino acid sequence of SEQ ID NO:265
WHWLQLKPGQPMY

SEQ ID NO: 1226 - protein, 13 aa, Saccharomyces cerevisiae
  REGION 1..13: note = Amino acid sequence of SEQ ID NO:266
WHWLQLKPGQPMY

SEQ ID NO: 1227 - protein, 13 aa, Saccharomyces cerevisiae
  REGION 1..13: note = Amino acid sequence of SEQ ID NO:267
WHWLQLKPGQPMY

SEQ ID NO: 1228 - protein, 13 aa, Saccharomyces cerevisiae
  REGION 1..13: note = Amino acid sequence of SEQ ID NO:268
WHWLQLKPGQPMY

SEQ ID NO: 1229 - protein, 13 aa, Saccharomyces cerevisiae
  REGION 1..13: note = Amino acid sequence of SEQ ID NO:269
WHWLQLKPGQPMY

SEQ ID NO: 1230 - protein, 13 aa, Saccharomyces cerevisiae
  REGION 1..13: note = Amino acid sequence of SEQ ID NO:270
WHWLQLKPGQPMY

SEQ ID NO: 1231 - protein, 13 aa, Saccharomyces cerevisiae
  REGION 1..13: note = Amino acid sequence of SEQ ID NO:271
WHWLQLKPGQPMY

SEQ ID NO: 1232 - protein, 13 aa, Saccharomyces cerevisiae
  REGION 1..13: note = Amino acid sequence of SEQ ID NO:272
WHWLQLKPGQPMY

SEQ ID NO: 1233 - protein, 13 aa, Saccharomyces cerevisiae
  REGION 1..13: note = Amino acid sequence of SEQ ID NO:273
WHWLQLKPGQPMY

SEQ ID NO: 1234 - protein, 13 aa, Saccharomyces cerevisiae
  REGION 1..13: note = Amino acid sequence of SEQ ID NO:274
WHWLQLKPGQPMY

SEQ ID NO: 1235 - protein, 13 aa, Saccharomyces cerevisiae
  REGION 1..13: note = Amino acid sequence of SEQ ID NO:275
WHWLQLKPGQPMY

SEQ ID NO: 1236 - protein, 13 aa, Saccharomyces cerevisiae
  REGION 1..13: note = Amino acid sequence of SEQ ID NO:276
WHWLNLRPGQPMY

SEQ ID NO: 1237 - protein, 13 aa, Saccharomyces cerevisiae
  REGION 1..13: note = Amino acid sequence of SEQ ID NO:277
WHWLQLKPGQPMY

SEQ ID NO: 1238 - protein, 10 aa, Sclerotinia sclerotiorum
  REGION 1..10: note = Amino acid sequence of SEQ ID NO:278
WCGRPGQPCK

SEQ ID NO: 1239 - protein, 9 aa, Sclerotinia sclerotiorum
  REGION 1..9: note = Amino acid sequence of SEQ ID NO:279
WCGRPGQPC

SEQ ID NO: 1240 - protein, 10 aa, Cordyceps militaris
  REGION 1..10: note = Amino acid sequence of SEQ ID NO:280
WCTRPGQPCW

SEQ ID NO: 1241 - protein, 10 aa, Cordyceps militaris
  REGION 1..10: note = Amino acid sequence of SEQ ID NO:281
WCTRPGEPCW

SEQ ID NO: 1242 - protein, 10 aa, Cordyceps militaris
  REGION 1..10: note = Amino acid sequence of SEQ ID NO:282
WCLRPGQPCW

SEQ ID NO: 1243 - protein, 10 aa, Botrytis cinerea
  REGION 1..10: note = Amino acid sequence of SEQ ID NO:283
WCGRPGQPCK

SEQ ID NO: 1244 - protein, 9 aa, Botrytis cinerea
  REGION 1..9: note = Amino acid sequence of SEQ ID NO:284
WCGRPGQPC

SEQ ID NO: 1245 - protein, 13 aa, Kluyveromyces marxianus
  REGION 1..13: note = Amino acid sequence of SEQ ID NO:285
WKWLSFRVGQPIY

SEQ ID NO: 1246 - protein, 12 aa, Kluyveromyces marxianus
  REGION 1..12: note = Amino acid sequence of SEQ ID NO:286
WKWLSFRVGQPI

SEQ ID NO: 1247 - protein, 13 aa, Kluyveromyces marxianus
  REGION 1..13: note = Amino acid sequence of SEQ ID NO:287
WKWLSFRIGQPIY

SEQ ID NO: 1248 - protein, 12 aa, Kluyveromyces marxianus
  REGION 1..12: note = Amino acid sequence of SEQ ID NO:288
WKWLSFRIGQPI

SEQ ID NO: 1249 - protein, 13 aa, Kluyveromyces marxianus
  REGION 1..13: note = Amino acid sequence of SEQ ID NO:289
WKWLSLRVGQPIY

SEQ ID NO: 1250 - protein, 12 aa, Kluyveromyces marxianus
  REGION 1..12: note = Amino acid sequence of SEQ ID NO:290
WKWLSLRVGQPI

SEQ ID NO: 1251 - protein, 11 aa, Kluyveromyces marxianus
  REGION 1..11: note = Amino acid sequence of SEQ ID NO:291
WLSFRVGQPIY

SEQ ID NO: 1252 - protein, 13 aa, Kluyveromyces marxianus
  REGION 1..13: note = Amino acid sequence of SEQ ID NO:292
WEWLSLRVGQPLY

SEQ ID NO: 1253 - protein, 11 aa, Kluyveromyces marxianus
  REGION 1..11: note = Amino acid sequence of SEQ ID NO:293
WEWLSLRVGQP

SEQ ID NO: 1254 - protein, 11 aa, Kluyveromyces marxianus
  REGION 1..11: note = Amino acid sequence of SEQ ID NO:294
WLSFRIGQPIY

SEQ ID NO: 1255 - protein, 11 aa, Kluyveromyces marxianus
  REGION 1..11: note = Amino acid sequence of SEQ ID NO:295
WLSLRVGQPIY

SEQ ID NO: 1256 - protein, 13 aa, Kluyveromyces marxianus
  REGION 1..13: note = Amino acid sequence of SEQ ID NO:296
WKWLSFRVGQPIY

SEQ ID NO: 1257 - protein, 12 aa, Kluyveromyces marxianus
  REGION 1..12: note = Amino acid sequence of SEQ ID NO:297
WKWLSFRVGQPI

SEQ ID NO: 1258 - protein, 13 aa, Kluyveromyces marxianus
  REGION 1..13: note = Amino acid sequence of SEQ ID NO:298
WKWLSFRIGQPIY

SEQ ID NO: 1259 - protein, 12 aa, Kluyveromyces marxianus
  REGION 1..12: note = Amino acid sequence of SEQ ID NO:299
WKWLSFRIGQPI

SEQ ID NO: 1260 - protein, 13 aa, Kluyveromyces marxianus
  REGION 1..13: note = Amino acid sequence of SEQ ID NO:300
WKWLSLRVGQPIY

SEQ ID NO: 1261 - protein, 12 aa, Kluyveromyces marxianus
  REGION 1..12: note = Amino acid sequence of SEQ ID NO:301
WKWLSLRVGQPI

SEQ ID NO: 1262 - protein, 11 aa, Kluyveromyces marxianus
  REGION 1..11: note = Amino acid sequence of SEQ ID NO:302
WLSFRVGQPIY

SEQ ID NO: 1263 - protein, 13 aa, Kluyveromyces marxianus
  REGION 1..13: note = Amino acid sequence of SEQ ID NO:303
WEWLSLRVGQPLY

SEQ ID NO: 1264 - protein, 11 aa, Kluyveromyces marxianus
  REGION 1..11: note = Amino acid sequence of SEQ ID NO:304
WEWLSLRVGQP

SEQ ID NO: 1265 - protein, 11 aa, Kluyveromyces marxianus
  REGION 1..11: note = Amino acid sequence of SEQ ID NO:305
WLSFRIGQPIY

SEQ ID NO: 1266 - protein, 11 aa, Kluyveromyces marxianus
  REGION 1..11: note = Amino acid sequence of SEQ ID NO:306
WLSLRVGQPIY

SEQ ID NO: 1267 - protein, 13 aa, Saccharomyces cerevisiae
  REGION 1..13: note = Amino acid sequence of SEQ ID NO:307
WHWLNLRPGQPMY

SEQ ID NO: 1268 - protein, 13 aa, Saccharomyces cerevisiae
  REGION 1..13: note = Amino acid sequence of SEQ ID NO:308
WHWLQLKPGQPMY

SEQ ID NO: 1269 - protein, 13 aa, Saccharomyces cerevisiae
  REGION 1..13: note = Amino acid sequence of SEQ ID NO:309
WHWLQLKPGQPMY

SEQ ID NO: 1270 - protein, 13 aa, Saccharomyces cerevisiae
  REGION 1..13: note = Amino acid sequence of SEQ ID NO:310
WHWLNLRPGQPMY

SEQ ID NO: 1271 - protein, 13 aa, Saccharomyces cerevisiae
  REGION 1..13: note = Amino acid sequence of SEQ ID NO:311
WHWLQLKPGQPMY

SEQ ID NO: 1272 - protein, 13 aa, Saccharomyces cerevisiae
  REGION 1..13: note = Amino acid sequence of SEQ ID NO:312
WHWLNLRPGQPMY

SEQ ID NO: 1273 - protein, 13 aa, Saccharomyces cerevisiae
  REGION 1..13: note = Amino acid sequence of SEQ ID NO:313
WHWLQLKPGQPMY

SEQ ID NO: 1274 - protein, 13 aa, Saccharomyces cerevisiae
  REGION 1..13: note = Amino acid sequence of SEQ ID NO:314
WHWLNLRPGQPMY

SEQ ID NO: 1275 - protein, 13 aa, Saccharomyces cerevisiae
  REGION 1..13: note = Amino acid sequence of SEQ ID NO:315
WHWLQLKPGQPMY

SEQ ID NO: 1276 - protein, 13 aa, Saccharomyces cerevisiae
  REGION 1..13: note = Amino acid sequence of SEQ ID NO:316
WHWLQLKPGQPMY

SEQ ID NO: 1277 - protein, 13 aa, Saccharomyces cerevisiae
  REGION 1..13: note = Amino acid sequence of SEQ ID NO:317
WHWLQLKPGQPMY

SEQ ID NO: 1278 - protein, 13 aa, Saccharomyces cerevisiae
  REGION 1..13: note = Amino acid sequence of SEQ ID NO:318
WHWLQLKPGQPMY

SEQ ID NO: 1279 - protein, 13 aa, Saccharomyces cerevisiae
  REGION 1..13: note = Amino acid sequence of SEQ ID NO:319
WHWLNLRPGQPMY

SEQ ID NO: 1280 - protein, 13 aa, Saccharomyces cerevisiae
  REGION 1..13: note = Amino acid sequence of SEQ ID NO:320
WHWLQLKPGQPMY

SEQ ID NO: 1281 - protein, 13 aa, Saccharomyces cerevisiae
  REGION 1..13: note = Amino acid sequence of SEQ ID NO:321
WHWLNLRPGQPMY

SEQ ID NO: 1282 - protein, 13 aa, Saccharomyces cerevisiae
  REGION 1..13: note = Amino acid sequence of SEQ ID NO:322
WHWLQLKPGQPMY

SEQ ID NO: 1283 - protein, 13 aa, Saccharomyces cerevisiae
  REGION 1..13: note = Amino acid sequence of SEQ ID NO:323
WHWLNLRPGQPMY

SEQ ID NO: 1284 - protein, 13 aa, Saccharomyces cerevisiae
  REGION 1..13: note = Amino acid sequence of SEQ ID NO:324
WHWLQLKPGQPMY

SEQ ID NO: 1285 - protein, 13 aa, Saccharomyces cerevisiae
  REGION 1..13: note = Amino acid sequence of SEQ ID NO:325
WHWLNLRPGQPMY

SEQ ID NO: 1286 - protein, 13 aa, Saccharomyces cerevisiae
  REGION 1..13: note = Amino acid sequence of SEQ ID NO:326
WHWLQLKPGQPMY

SEQ ID NO: 1287 - protein, 13 aa, Saccharomyces cerevisiae
  REGION 1..13: note = Amino acid sequence of SEQ ID NO:327
WHWLQLKPGQPMY

SEQ ID NO: 1288 - protein, 13 aa, Saccharomyces cerevisiae
  REGION 1..13: note = Amino acid sequence of SEQ ID NO:328
WHWLQLKPGQPMY

SEQ ID NO: 1289 - protein, 13 aa, Saccharomyces cerevisiae
  REGION 1..13: note = Amino acid sequence of SEQ ID NO:329
WHWLQLKPGQPMY

SEQ ID NO: 1290 - protein, 13 aa, Saccharomyces cerevisiae
  REGION 1..13: note = Amino acid sequence of SEQ ID NO:330
WHWLQLKPGQPMY

SEQ ID NO: 1291 - protein, 12 aa, Kluyveromyces lactis
  REGION 1..12: note = Amino acid sequence of SEQ ID NO:331
WSWITLRPGQPI

SEQ ID NO: 1292 - protein, 10 aa, Zygosaccharomyces rouxii
  REGION 1..10: note = Amino acid sequence of SEQ ID NO:332
HFVELDPGQP

SEQ ID NO: 1293 - protein, 10 aa, Zygosaccharomyces rouxii
  REGION 1..10: note = Amino acid sequence of SEQ ID NO:333
HFIELDPGQP

SEQ ID NO: 1294 - protein, 13 aa, Lachancea thermotolerans
  REGION 1..13: note = Amino acid sequence of SEQ ID NO:334
WRWLSLARGQPMY

SEQ ID NO: 1295 - protein, 13 aa, Lachancea thermotolerans
  REGION 1..13: note = Amino acid sequence of SEQ ID NO:335
WRWLSLSRGQPMY

SEQ ID NO: 1296 - protein, 13 aa, Saccharomyces cerevisiae
  REGION 1..13: note = Amino acid sequence of SEQ ID NO:336
WHWLNLRPGQPMY

SEQ ID NO: 1297 - protein, 13 aa, Saccharomyces cerevisiae
  REGION 1..13: note = Amino acid sequence of SEQ ID NO:337
WHWLQLKPGQPMY

SEQ ID NO: 1298 - protein, 13 aa, Saccharomyces cerevisiae
  REGION 1..13: note = Amino acid sequence of SEQ ID NO:338
WHWLQLKPGQPMY

SEQ ID NO: 1299 - protein, 13 aa, Naumovozyma castellii
  REGION 1..13: note = Amino acid sequence of SEQ ID NO:339
WHWLRLDPGQPLY

SEQ ID NO: 1300 - protein, 13 aa, Naumovozyma castellii
  REGION 1..13: note = Amino acid sequence of SEQ ID NO:340
WHWLRLDPGQPLY

SEQ ID NO: 1301 - protein, 13 aa, Naumovozyma dairenensis
  REGION 1..13: note = Amino acid sequence of SEQ ID NO:341
WHWLRLDPGQPLY

SEQ ID NO: 1302 - protein, 13 aa, Naumovozyma dairenensis
  REGION 1..13: note = Amino acid sequence of SEQ ID NO:342
WHWLRLDPGQPLY

SEQ ID NO: 1303 - protein, 13 aa, Naumovozyma dairenensis
  REGION 1..13: note = Amino acid sequence of SEQ ID NO:343
WHWLRLDAGQPLY

SEQ ID NO: 1304 - protein, 10 aa, Botrytis cinerea
  REGION 1..10: note = Amino acid sequence of SEQ ID NO:344
WCGRPGQPCK

SEQ ID NO: 1305 - protein, 9 aa, Botrytis cinerea
  REGION 1..9: note = Amino acid sequence of SEQ ID NO:345
WCGRPGQPC

SEQ ID NO: 1306 - protein, 10 aa, Claviceps purpurea
  REGION 1..10: note = Amino acid sequence of SEQ ID NO:346
WCWRPGQGCW

SEQ ID NO: 1307 - protein, 10 aa, Claviceps purpurea
  REGION 1..10: note = Amino acid sequence of SEQ ID NO:347
WCWRPGEGCW

SEQ ID NO: 1308 - protein, 13 aa, Tetrapisispora phaffii
  REGION 1..13: note = Amino acid sequence of SEQ ID NO:348
WHWLRLDPGQPLY

SEQ ID NO: 1309 - protein, 13 aa, Kazachstania africana
  REGION 1..13: note = Amino acid sequence of SEQ ID NO:349
WHWLSIAPGQPMY

SEQ ID NO: 1310 - protein, 13 aa, Kazachstania africana
  REGION 1..13: note = Amino acid sequence of SEQ ID NO:350
WHWLSISPGQPMY

SEQ ID NO: 1311 - protein, 13 aa, Kazachstania africana
  REGION 1..13: note = Amino acid sequence of SEQ ID NO:351
WHWLSISPGQPMY

SEQ ID NO: 1312 - protein, 10 aa, Tetrapisispora blattae
  REGION 1..10: note = Amino acid sequence of SEQ ID NO:352
HWLRLGRGEP

SEQ ID NO: 1313 - protein, 12 aa, Tetrapisispora blattae
  REGION 1..12: note = Amino acid sequence of SEQ ID NO:353
HWLRLGRGEPLY

SEQ ID NO: 1314 - protein, 13 aa, Kazachstania naganishii
  REGION 1..13: note = Amino acid sequence of SEQ ID NO:354
WHWLRLSYGQPIY

SEQ ID NO: 1315 - protein, 12 aa, Kazachstania naganishii
  REGION 1..12: note = Amino acid sequence of SEQ ID NO:355
WHWLRLSYGQPI

SEQ ID NO: 1316 - protein, 11 aa, Kazachstania naganishii
  REGION 1..11: note = Amino acid sequence of SEQ ID NO:356
WHWLRLSYGQP

SEQ ID NO: 1317 - protein, 10 aa, Fusarium fujikuroi
  REGION 1..10: note = Amino acid sequence of SEQ ID NO:357
WCTWRGQPCW

SEQ ID NO: 1318 - protein, 10 aa, Fusarium fujikuroi
  REGION 1..10: note = Amino acid sequence of SEQ ID NO:358
WCMWRGQPCW

SEQ ID NO: 1319 - protein, 12 aa, Kluyveromyces dobzhanskii
  REGION 1..12: note = Amino acid sequence of SEQ ID NO:359
WSWISLRPGQPI

SEQ ID NO: 1320 - protein, 12 aa, Kluyveromyces dobzhanskii
  REGION 1..12: note = Amino acid sequence of SEQ ID NO:360
WSWISLRRGQPI

SEQ ID NO: 1321 - protein, 10 aa, Fusarium graminearum
  REGION 1..10: note = Amino acid sequence of SEQ ID NO:361
WCTWKGQPCW

SEQ ID NO: 1322 - protein, 10 aa, Fusarium graminearum
  REGION 1..10: note = Amino acid sequence of SEQ ID NO:362
WCWWKGQPCW

SEQ ID NO: 1323 - protein, 10 aa, Fusarium venenatum
  REGION 1..10: note = Amino acid sequence of SEQ ID NO:363
WCTWKGQPCW

SEQ ID NO: 1324 - protein, 10 aa, Fusarium venenatum
  REGION 1..10: note = Amino acid sequence of SEQ ID NO:364
WCWWKGQPCW

SEQ ID NO: 1325 - protein, 13 aa, Lachancea lanzarotensis
  REGION 1..13: note = Amino acid sequence of SEQ ID NO:365
WRWLSLARGQPMY

SEQ ID NO: 1326 - protein, 10 aa, Verticillium longisporum
  REGION 1..10: note = Amino acid sequence of SEQ ID NO:366
PCPRPGQGCW

SEQ ID NO: 1327 - protein, 10 aa, Verticillium longisporum
  REGION 1..10: note = Amino acid sequence of SEQ ID NO:367
PCPRPGQGCW

SEQ ID NO: 1328 - protein, 10 aa, Verticillium longisporum
  REGION 1..10: note = Amino acid sequence of SEQ ID NO:368
PCPRPGQGCW

SEQ ID NO: 1329 - protein, 13 aa, Lachancea quebecensis
  REGION 1..13: note = Amino acid sequence of SEQ ID NO:369
WRWLSLSRGQPMY

SEQ ID NO: 1330 - protein, 13 aa, Lachancea quebecensis
  REGION 1..13: note = Amino acid sequence of SEQ ID NO:370
WRWLRLSRGQPMY

SEQ ID NO: 1331 - protein, 11 aa, Lachancea quebecensis
  REGION 1..11: note = Amino acid sequence of SEQ ID NO:371
WLSLSRGQPMY

SEQ ID NO: 1332 - protein, 11 aa, Lachancea quebecensis
  REGION 1..11: note = Amino acid sequence of SEQ ID NO:372
WLRLSRGQPMY

SEQ ID NO: 1333 - protein, 10 aa, Fusarium proliferatum
  REGION 1..10: note = Amino acid sequence of SEQ ID NO:373
WCMWRGQPCW

SEQ ID NO: 1334 - protein, 10 aa, Fusarium proliferatum
  REGION 1..10: note = Amino acid sequence of SEQ ID NO:374
WCTWRGQPCW

SEQ ID NO: 1335 - protein, 10 aa, Fusarium mangiferae
  REGION 1..10: note = Amino acid sequence of SEQ ID NO:375
WCTWRGQPCW

SEQ ID NO: 1336 - protein, 10 aa, Fusarium mangiferae
  REGION 1..10: note = Amino acid sequence of SEQ ID NO:376
WCMWRGQPCW

SEQ ID NO: 1337 - protein, 10 aa, Fusarium proliferatum
  REGION 1..10: note = Amino acid sequence of SEQ ID NO:377
WCTWRGQPCW

SEQ ID NO: 1338 - protein, 10 aa, Fusarium proliferatum
  REGION 1..10: note = Amino acid sequence of SEQ ID NO:378
WCMWRGQPCW

SEQ ID NO: 1339 - protein, 13 aa, Saccharomyces cerevisiae
  REGION 1..13: note = Amino acid sequence of SEQ ID NO:379
WHWLNLRPGQPMY

SEQ ID NO: 1340 - protein, 13 aa, Saccharomyces cerevisiae
  REGION 1..13: note = Amino acid sequence of SEQ ID NO:380
WHWLQLKPGQPMY

SEQ ID NO: 1341 - protein, 13 aa, Saccharomyces cerevisiae
  REGION 1..13: note = Amino acid sequence of SEQ ID NO:381
WHWLQLKPGQPMY

SEQ ID NO: 1342 - protein, 13 aa, Saccharomyces cerevisiae
  REGION 1..13: note = Amino acid sequence of SEQ ID NO:382
WHWLQLKPGQPMY

SEQ ID NO: 1343 - protein, 13 aa, Saccharomyces cerevisiae
  REGION 1..13: note = Amino acid sequence of SEQ ID NO:383
WHWLNLRPGQPMY

SEQ ID NO: 1344 - protein, 13 aa, Saccharomyces cerevisiae
  REGION 1..13: note = Amino acid sequence of SEQ ID NO:384
WHWLQLKPGQPMY

SEQ ID NO: 1345 - protein, 10 aa, Sclerotinia sclerotiorum
  REGION 1..10: note = Amino acid sequence of SEQ ID NO:385
WCGRPGQPCK

SEQ ID NO: 1346 - protein, 9 aa, Sclerotinia sclerotiorum
  REGION 1..9: note = Amino acid sequence of SEQ ID NO:386
WCGRPGQPC

SEQ ID NO: 1347 - protein, 13 aa, Vanderwaltozyma polyspora
  REGION 1..13: note = Amino acid sequence of SEQ ID NO:387
WHWLRLRYGEPIY

SEQ ID NO: 1348 - protein, 12 aa, Vanderwaltozyma polyspora
  REGION 1..12: note = Amino acid sequence of SEQ ID NO:388
WHWLELDNGQPI

SEQ ID NO: 1349 - protein, 13 aa, Vanderwaltozyma polyspora
  REGION 1..13: note = Amino acid sequence of SEQ ID NO:389
WHWLELDNGQPIY

SEQ ID NO: 1350 - protein, 13 aa, Saccharomyces cerevisiae
  REGION 1..13: note = Amino acid sequence of SEQ ID NO:390
WHWLNLRPGQPMY

SEQ ID NO: 1351 - protein, 13 aa, Saccharomyces cerevisiae
  REGION 1..13: note = Amino acid sequence of SEQ ID NO:391
WHWLQLKPGQPMY

SEQ ID NO: 1352 - protein, 13 aa, Saccharomyces cerevisiae
  REGION 1..13: note = Amino acid sequence of SEQ ID NO:392
WHWLQLKPGQPMY

SEQ ID NO: 1353 - protein, 13 aa, Saccharomyces cerevisiae
  REGION 1..13: note = Amino acid sequence of SEQ ID NO:393
WHWLNLRPGQPMY

SEQ ID NO: 1354 - protein, 13 aa, Saccharomyces cerevisiae
  REGION 1..13: note = Amino acid sequence of SEQ ID NO:394
WHWLQLKPGQPMY

SEQ ID NO: 1355 - protein, 13 aa, Saccharomyces cerevisiae
  REGION 1..13: note = Amino acid sequence of SEQ ID NO:395
WHWLQLKPGQPMY

SEQ ID NO: 1356 - protein, 10 aa, Verticillium alfalfae
  REGION 1..10: note = Amino acid sequence of SEQ ID NO:396
PCPRPGQGCW

SEQ ID NO: 1357 - protein, 10 aa, Metarhizium acridum
  REGION 1..10: note = Amino acid sequence of SEQ ID NO:397
WCYRPGQPCW

SEQ ID NO: 1358 - protein, 10 aa, Metarhizium acridum
  REGION 1..10: note = Amino acid sequence of SEQ ID NO:398
WCWRPGQPCW

SEQ ID NO: 1359 - protein, 10 aa, Metarhizium acridum
  REGION 1..10: note = Amino acid sequence of SEQ ID NO:399
WCWQPGQPCW

SEQ ID NO: 1360 - protein, 10 aa, Metarhizium robertsii
  REGION 1..10: note = Amino acid sequence of SEQ ID NO:400
WCWQPGQPCW

SEQ ID NO: 1361 - protein, 10 aa, Metarhizium robertsii
  REGION 1..10: note = Amino acid sequence of SEQ ID NO:401
WCWRPGQPCW

SEQ ID NO: 1362 - protein, 13 aa, Saccharomyces cerevisiae
  REGION 1..13: note = Amino acid sequence of SEQ ID NO:402
WHWLQLKPGQPMY

SEQ ID NO: 1363 - protein, 13 aa, Saccharomyces cerevisiae
  REGION 1..13: note = Amino acid sequence of SEQ ID NO:403
WHWLNLRPGQPMY

SEQ ID NO: 1364 - protein, 13 aa, Saccharomyces cerevisiae
  REGION 1..13: note = Amino acid sequence of SEQ ID NO:404
WHWLQLKPGQPMY

SEQ ID NO: 1365 - protein, 13 aa, Saccharomyces cerevisiae
  REGION 1..13: note = Amino acid sequence of SEQ ID NO:405
WHWLNLRPGQPMY

SEQ ID NO: 1366 - protein, 13 aa, Saccharomyces cerevisiae
  REGION 1..13: note = Amino acid sequence of SEQ ID NO:406
WHWLQLKPGQPMY

SEQ ID NO: 1367 - protein, 13 aa, Saccharomyces cerevisiae
  REGION 1..13: note = Amino acid sequence of SEQ ID NO:407
WHWLQLKPGQPMY

SEQ ID NO: 1368 - protein, 13 aa, Saccharomyces cerevisiae
  REGION 1..13: note = Amino acid sequence of SEQ ID NO:408
WHWLNLRPGQPMY

SEQ ID NO: 1369 - protein, 13 aa, Saccharomyces cerevisiae
  REGION 1..13: note = Amino acid sequence of SEQ ID NO:409
WHWLQLKPGQPMY

SEQ ID NO: 1370 - protein, 13 aa, Saccharomyces cerevisiae
  REGION 1..13: note = Amino acid sequence of SEQ ID NO:410
WHWLQLKPGQPMY

SEQ ID NO: 1371 - protein, 13 aa, Saccharomyces cerevisiae
  REGION 1..13: note = Amino acid sequence of SEQ ID NO:411
WHWLNLRPGQPMY

SEQ ID NO: 1372 - protein, 13 aa, Saccharomyces cerevisiae
  REGION 1..13: note = Amino acid sequence of SEQ ID NO:412
WHWLQLKPGQPMY

SEQ ID NO: 1373 - protein, 13 aa, Saccharomyces cerevisiae
  REGION 1..13: note = Amino acid sequence of SEQ ID NO:413
WHWLQLKPGQPMY

SEQ ID NO: 1374 - protein, 13 aa, Saccharomyces cerevisiae
  REGION 1..13: note = Amino acid sequence of SEQ ID NO:414
WHWLNLRPGQPMY

SEQ ID NO: 1375 - protein, 13 aa, Saccharomyces cerevisiae
  REGION 1..13: note = Amino acid sequence of SEQ ID NO:415
WHWLQLKPGQPMY

SEQ ID NO: 1376 - protein, 13 aa, Saccharomyces cerevisiae
  REGION 1..13: note = Amino acid sequence of SEQ ID NO:416
WHWLQLKPGQPMY

SEQ ID NO: 1377 - protein, 13 aa, Saccharomyces cerevisiae
  REGION 1..13: note = Amino acid sequence of SEQ ID NO:417
WHWLNLRPGQPMY

SEQ ID NO: 1378 - protein, 13 aa, Saccharomyces cerevisiae
  REGION 1..13: note = Amino acid sequence of SEQ ID NO:418
WHWLQLKPGQPMY

SEQ ID NO: 1379 - protein, 10 aa, Fusarium oxysporum
  REGION 1..10: note = Amino acid sequence of SEQ ID NO:419
WCTWRGQPCW

SEQ ID NO: 1380 - protein, 10 aa, Fusarium oxysporum
  REGION 1..10: note = Amino acid sequence of SEQ ID NO:420
WCMWRGQPCW

SEQ ID NO: 1381 - protein, 10 aa, Fusarium oxysporum
  REGION 1..10: note = Amino acid sequence of SEQ ID NO:421
WCLWRGQPCW

SEQ ID NO: 1382 - protein, 10 aa, Fusarium oxysporum
  REGION 1..10: note = Amino acid sequence of SEQ ID NO:422
WCTWRGQPCW

SEQ ID NO: 1383 - protein, 10 aa, Verticillium dahliae
  REGION 1..10: note = Amino acid sequence of SEQ ID NO:423
PCPRPGQGCW

SEQ ID NO: 1384 - protein, 10 aa, Pyricularia oryzae
  REGION 1..10: note = Amino acid sequence of SEQ ID NO:424
WCPRRGQPCW

SEQ ID NO: 1385 - protein, 13 aa, Saccharomyces sp.
  REGION 1..13: note = Amino acid sequence of SEQ ID NO:425
  source 1..13: note = Saccharomyces cerevisiae x Saccharomyces kudriavzevii VIN7
WHWLQLKPGQPMY

SEQ ID NO: 1386 - protein, 13 aa, Saccharomyces sp.
  REGION 1..13: note = Amino acid sequence of SEQ ID NO:426
  source 1..13: note = Saccharomyces cerevisiae x Saccharomyces kudriavzevii VIN7
WHWLNLRPGQPMY

SEQ ID NO: 1387 - protein, 13 aa, Saccharomyces sp.
  REGION 1..13: note = Amino acid sequence of SEQ ID NO:427
  source 1..13: note = Saccharomyces cerevisiae x Saccharomyces kudriavzevii VIN7
WHWLQLKPGQPMY

SEQ ID NO: 1388 - protein, 13 aa, Saccharomyces cerevisiae
  REGION 1..13: note = Amino acid sequence of SEQ ID NO:428
WHWLQLKPGQPMY

SEQ ID NO: 1389 - protein, 13 aa, Saccharomyces cerevisiae
  REGION 1..13: note = Amino acid sequence of SEQ ID NO:429
WHWLNLRPGQPMY

SEQ ID NO: 1390 - protein, 13 aa, Saccharomyces cerevisiae
  REGION 1..13: note = Amino acid sequence of SEQ ID NO:430
WHWLQLKPGQPMY

SEQ ID NO: 1391 - protein, 10 aa, Beauveria bassiana
  REGION 1..10: note = Amino acid sequence of SEQ ID NO:431
WCMRPGQPCW

SEQ ID NO: 1392 - protein, 13 aa, Saccharomyces kudriavzevii
  REGION 1..13: note = Amino acid sequence of SEQ ID NO:432
WHWLQLKPGQPMY

SEQ ID NO: 1393 - protein, 13 aa, Saccharomyces kudriavzevii
  REGION 1..13: note = Amino acid sequence of SEQ ID NO:433
WHWLQLKPGQPMY

SEQ ID NO: 1394 - protein, 13 aa, Saccharomyces kudriavzevii
  REGION 1..13: note = Amino acid sequence of SEQ ID NO:434
WHWLQLRPGQPMY

SEQ ID NO: 1395 - protein, 10 aa, Fusarium pseudograminearum
  REGION 1..10: note = Amino acid sequence of SEQ ID NO:435
WCTWKGQPCW

SEQ ID NO: 1396 - protein, 10 aa, Fusarium pseudograminearum
  REGION 1..10: note = Amino acid sequence of SEQ ID NO:436
WCWWKGQPCW

SEQ ID NO: 1397 - protein, 10 aa, Pyricularia oryzae
  REGION 1..10: note = Amino acid sequence of SEQ ID NO:437
WCPRRGQPCW

SEQ ID NO: 1398 - protein, 10 aa, Pyricularia oryzae
  REGION 1..10: note = Amino acid sequence of SEQ ID NO:438
WCPRRGQPCW

SEQ ID NO: 1399 - protein, 9 aa, Pseudogymnoascus destructans
  REGION 1..9: note = Amino acid sequence of SEQ ID NO:439
CWRPGQPCG

SEQ ID NO: 1400 - protein, 9 aa, Botrytis cinerea
  REGION 1..9: note = Amino acid sequence of SEQ ID NO:440
WCGRPGQPC

SEQ ID NO: 1401 - protein, 10 aa, Botrytis cinerea
  REGION 1..10: note = Amino acid sequence of SEQ ID NO:441
WCGRPGQPCK

SEQ ID NO: 1402 - protein, 10 aa, Fusarium odoratissimum
  REGION 1..10: note = Amino acid sequence of SEQ ID NO:442
WCMWRGQPCW

SEQ ID NO: 1403 - protein, 10 aa, Fusarium odoratissimum
  REGION 1..10: note = Amino acid sequence of SEQ ID NO:443
WCLWRGQPCW

SEQ ID NO: 1404 - protein, 10 aa, Fusarium odoratissimum
  REGION 1..10: note = Amino acid sequence of SEQ ID NO:444
WCTWRGQPCW

SEQ ID NO: 1405 - protein, 10 aa, Fusarium oxysporum
  REGION 1..10: note = Amino acid sequence of SEQ ID NO:445
  source 1..10: note = f. sp. cubense race 1
WCMWRGQPCW

SEQ ID NO: 1406 - protein, 10 aa, Fusarium oxysporum
  REGION 1..10: note = Amino acid sequence of SEQ ID NO:446
  source 1..10: note = f. sp. cubense race 1
WCLWRGQPCW

SEQ ID NO: 1407 - protein, 10 aa, Fusarium oxysporum
  REGION 1..10: note = Amino acid sequence of SEQ ID NO:447
  source 1..10: note = f. sp. cubense race 1
WCTWRGQPCW

SEQ ID NO: 1408 - protein, 10 aa, Fusarium graminearum
  REGION 1..10: note = Amino acid sequence of SEQ ID NO:448
WCTWKGQPCW

SEQ ID NO: 1409 - protein, 10 aa, Fusarium graminearum
  REGION 1..10: note = Amino acid sequence of SEQ ID NO:449
WCWWKGQPCW

SEQ ID NO: 1410 - protein, 9 aa, Sclerotinia borealis
  REGION 1..9: note = Amino acid sequence of SEQ ID NO:450
WCGRPGQPC

SEQ ID NO: 1411 - protein, 10 aa, Sclerotinia borealis
  REGION 1..10: note = Amino acid sequence of SEQ ID NO:451
WCGRPGQPCK

SEQ ID NO: 1412 - protein, 10 aa, Fusarium verticillioides
  REGION 1..10: note = Amino acid sequence of SEQ ID NO:452
WCTWRGQPCW

SEQ ID NO: 1413 - protein, 10 aa, Fusarium verticillioides
  REGION 1..10: note = Amino acid sequence of SEQ ID NO:453
WCMWRGQPCW

SEQ ID NO: 1414 - protein, 13 aa, Saccharomyces cerevisiae
  REGION 1..13: note = Amino acid sequence of SEQ ID NO:454
WHWLQLKPGQPMY

SEQ ID NO: 1415 - protein, 13 aa, Saccharomyces cerevisiae
  REGION 1..13: note = Amino acid sequence of SEQ ID NO:455
WHWLNLRPGQPMY

SEQ ID NO: 1416 - protein, 13 aa, Saccharomyces cerevisiae
  REGION 1..13: note = Amino acid sequence of SEQ ID NO:456
WHWLQLKPGQPMY

SEQ ID NO: 1417 - protein, 13 aa, Saccharomyces cerevisiae
  REGION 1..13: note = Amino acid sequence of SEQ ID NO:457
WHWLQLKPGQPMY

SEQ ID NO: 1418 - protein, 13 aa, Saccharomyces cerevisiae
  REGION 1..13: note = Amino acid sequence of SEQ ID NO:458
WHWLNLRPGQPMY

SEQ ID NO: 1419 - protein, 13 aa, Saccharomyces cerevisiae
  REGION 1..13: note = Amino acid sequence of SEQ ID NO:459
WHWLQLKPGQPMY

SEQ ID NO: 1420 - protein, 10 aa, Fusarium oxysporum
  REGION 1..10: note = Amino acid sequence of SEQ ID NO:460
WCLWRGQPCW

SEQ ID NO: 1421 - protein, 10 aa, Fusarium oxysporum
  REGION 1..10: note = Amino acid sequence of SEQ ID NO:461
WCTWRGQPCW

SEQ ID NO: 1422 - protein, 10 aa, Fusarium oxysporum
  REGION 1..10: note = Amino acid sequence of SEQ ID NO:462
WCMWRGQPCW

SEQ ID NO: 1423 - protein, 10 aa, Fusarium oxysporum
  REGION 1..10: note = Amino acid sequence of SEQ ID NO:463
WCLWRGQPCW

SEQ ID NO: 1424 - protein, 10 aa, Fusarium oxysporum
  REGION 1..10: note = Amino acid sequence of SEQ ID NO:464
WCTWRGQPCW

SEQ ID NO: 1425 - protein, 10 aa, Fusarium oxysporum
  REGION 1..10: note = Amino acid sequence of SEQ ID NO:465
WCMWRGQPCW

SEQ ID NO: 1426 - protein, 10 aa, Fusarium oxysporum
  REGION 1..10: note = Amino acid sequence of SEQ ID NO:466
WCMWRGQPCW

SEQ ID NO: 1427 - protein, 10 aa, Fusarium oxysporum
  REGION 1..10: note = Amino acid sequence of SEQ ID NO:467
WCLWRGQPCW

SEQ ID NO: 1428 - protein, 10 aa, Fusarium oxysporum
  REGION 1..10: note = Amino acid sequence of SEQ ID NO:468
WCTWRGQPCW

SEQ ID NO: 1429 - protein, 10 aa, Fusarium oxysporum
  REGION 1..10: note = Amino acid sequence of SEQ ID NO:469
WCMWRGQPCW

SEQ ID NO: 1430 - protein, 10 aa, Fusarium oxysporum
  REGION 1..10: note = Amino acid sequence of SEQ ID NO:470
WCLWRGQPCW

SEQ ID NO: 1431 - protein, 10 aa, Fusarium oxysporum
  REGION 1..10: note = Amino acid sequence of SEQ ID NO:471
WCTWRGQPCW

SEQ ID NO: 1432 - protein, 10 aa, Fusarium oxysporum
  REGION 1..10: note = Amino acid sequence of SEQ ID NO:472
WCTWRGQPCW

SEQ ID NO: 1433 - protein, 10 aa, Fusarium oxysporum
  REGION 1..10: note = Amino acid sequence of SEQ ID NO:473
WCMWRGQPCW

SEQ ID NO: 1434 - protein, 10 aa, Fusarium oxysporum
  REGION 1..10: note = Amino acid sequence of SEQ ID NO:474
WCLWRGQPCW

SEQ ID NO: 1435 - protein, 10 aa, Fusarium oxysporum
  REGION 1..10: note = Amino acid sequence of SEQ ID NO:475
WCMWRGQPCW

SEQ ID NO: 1436 - protein, 10 aa, Fusarium oxysporum
  REGION 1..10: note = Amino acid sequence of SEQ ID NO:476
WCLWRGQPCW

SEQ ID NO: 1437 - protein, 10 aa, Fusarium oxysporum
  REGION 1..10: note = Amino acid sequence of SEQ ID NO:477
WCTWRGQPCW

SEQ ID NO: 1438 - protein, 10 aa, Fusarium oxysporum
  REGION 1..10: note = Amino acid sequence of SEQ ID NO:478
WCMWRGQPCW

SEQ ID NO: 1439 - protein, 10 aa, Fusarium oxysporum
  REGION 1..10: note = Amino acid sequence of SEQ ID NO:479
WCLWRGQPCW

SEQ ID NO: 1440 - protein, 10 aa, Fusarium oxysporum
  REGION 1..10: note = Amino acid sequence of SEQ ID NO:480
WCTWRGQPCW

SEQ ID NO: 1441 - protein, 10 aa, Fusarium oxysporum
  REGION 1..10: note = Amino acid sequence of SEQ ID NO:481
WCLWRGQPCW

SEQ ID NO: 1442 - protein, 10 aa, Fusarium oxysporum
  REGION 1..10: note = Amino acid sequence of SEQ ID NO:482
WCTWRGQPCW

SEQ ID NO: 1443 - protein, 10 aa, Fusarium oxysporum
  REGION 1..10: note = Amino acid sequence of SEQ ID NO:483
WCMWRGQPCW

SEQ ID NO: 1444 - protein, 10 aa, Fusarium odoratissimum
  REGION 1..10: note = Amino acid sequence of SEQ ID NO:484
WCTWRGQPCW

SEQ ID NO: 1445 - protein, 10 aa, Fusarium odoratissimum
  REGION 1..10: note = Amino acid sequence of SEQ ID NO:485
WCLWRGQPCW

SEQ ID NO: 1446 - protein, 10 aa, Fusarium odoratissimum
  REGION 1..10: note = Amino acid sequence of SEQ ID NO:486
WCMWRGQPCW

SEQ ID NO: 1447 - protein, 10 aa, Fusarium oxysporum
  REGION 1..10: note = Amino acid sequence of SEQ ID NO:487
WCTWRGQPCW

SEQ ID NO: 1448 - protein, 10 aa, Fusarium oxysporum
  REGION 1..10: note = Amino acid sequence of SEQ ID NO:488
WCLWRGQPCW

SEQ ID NO: 1449 - protein, 10 aa, Fusarium oxysporum
  REGION 1..10: note = Amino acid sequence of SEQ ID NO:489
WCMWRGQPCW

SEQ ID NO: 1450 - protein, 10 aa, Metarhizium robertsii
  REGION 1..10: note = Amino acid sequence of SEQ ID NO:490
WCWRPGQPCW

SEQ ID NO: 1451 - protein, 10 aa, Metarhizium robertsii
  REGION 1..10: note = Amino acid sequence of SEQ ID NO:491
WCWQPGQPCW

SEQ ID NO: 1452 - protein, 10 aa, Fusarium graminearum
  REGION 1..10: note = Amino acid sequence of SEQ ID NO:492
WCTWKGQPCW

SEQ ID NO: 1453 - protein, 10 aa, Fusarium graminearum
  REGION 1..10: note = Amino acid sequence of SEQ ID NO:493
WCWWKGQPCW

SEQ ID NO: 1454 - protein, 13 aa, Saccharomyces cerevisiae
  REGION 1..13: note = Amino acid sequence of SEQ ID NO:494
WHWLNLRPGQPMY

SEQ ID NO: 1455 - protein, 13 aa, Saccharomyces cerevisiae
  REGION 1..13: note = Amino acid sequence of SEQ ID NO:495
WHWLQLKPGQPMY

SEQ ID NO: 1456 - protein, 13 aa, Saccharomyces cerevisiae
  REGION 1..13: note = Amino acid sequence of SEQ ID NO:496
WHWLQLKPGQPMY

SEQ ID NO: 1457 - protein, 10 aa, Ustilaginoidea virens
  REGION 1..10: note = Amino acid sequence of SEQ ID NO:497
WCDRPGQPCW

SEQ ID NO: 1458 - protein, 10 aa, Ustilaginoidea virens
  REGION 1..10: note = Amino acid sequence of SEQ ID NO:498
WCWRPGEPCW

SEQ ID NO: 1459 - protein, 10 aa, Ustilaginoidea virens
  REGION 1..10: note = Amino acid sequence of SEQ ID NO:499
WCWRPGQPCW

SEQ ID NO: 1460 - protein, 10 aa, Zygosaccharomyces rouxii
  REGION 1..10: note = Amino acid sequence of SEQ ID NO:500
HFVELDPGQP

SEQ ID NO: 1461 - protein, 10 aa, Zygosaccharomyces rouxii
  REGION 1..10: note = Amino acid sequence of SEQ ID NO:501
HFIELDPGQP

SEQ ID NO: 1462 - protein, 10 aa, Zygosaccharomyces rouxii
  REGION 1..10: note = Amino acid sequence of SEQ ID NO:502
HFVELDPGQP

SEQ ID NO: 1463 - protein, 13 aa, Saccharomyces cerevisiae
  REGION 1..13: note = Amino acid sequence of SEQ ID NO:503
WHWLNLRPGQPMY

SEQ ID NO: 1464 - protein, 13 aa, Saccharomyces cerevisiae
  REGION 1..13: note = Amino acid sequence of SEQ ID NO:504
WHWLQLKPGQPMY

SEQ ID NO: 1465 - protein, 13 aa, Saccharomyces cerevisiae
  REGION 1..13: note = Amino acid sequence of SEQ ID NO:505
WHWLQLKPGQPMY

SEQ ID NO: 1466 - protein, 11 aa, unidentified
  REGION 1..11: note = Amino acid sequence of SEQ ID NO:506 (from Candida)
WGWLRFYPGEP

SEQ ID NO: 1467 - protein, 11 aa, unidentified
  REGION 1..11: note = Amino acid sequence of SEQ ID NO:507 (from Candida)
WGWLRFFPGEP

SEQ ID NO: 1468 - protein, 10 aa, Zygosaccharomyces mellis
  REGION 1..10: note = Amino acid sequence of SEQ ID NO:508
HFIELDAGQP

SEQ ID NO: 1469 - protein, 10 aa, Zygosaccharomyces mellis
  REGION 1..10: note = Amino acid sequence of SEQ ID NO:509
HFVELDPGQP

SEQ ID NO: 1470 - protein, 12 aa, Metschnikowia sp.
  REGION 1..12: note = Amino acid sequence of SEQ ID NO:510
  source 1..12: note = JCM 33374
WHWVALGLGQPM

SEQ ID NO: 1471 - protein, 11 aa, Metschnikowia sp.
  REGION 1..11: note = Amino acid sequence of SEQ ID NO:511
  source 1..11: note = JCM 33374
WHWVALGLGQP

SEQ ID NO: 1472 - protein, 12 aa, Metschnikowia sp.
  REGION 1..12: note = Amino acid sequence of SEQ ID NO:512
  source 1..12: note = JCM 33374
WHWVSLGLGQPM

SEQ ID NO: 1473 - protein, 11 aa, Metschnikowia sp.
  REGION 1..11: note = Amino acid sequence of SEQ ID NO:513
  source 1..11: note = JCM 33374
WHWVSLGLGQP

SEQ ID NO: 1474 - protein, 12 aa, Metschnikowia sp.
  REGION 1..12: note = Amino acid sequence of SEQ ID NO:514
  source 1..12: note = JCM 33374
WHWVALGLGQPM

SEQ ID NO: 1475 - protein, 11 aa, Metschnikowia sp.
  REGION 1..11: note = Amino acid sequence of SEQ ID NO:515
  source 1..11: note = JCM 33374
WHWVALGLGQP

SEQ ID NO: 1476 - protein, 12 aa, Metschnikowia sp.
  REGION 1..12: note = Amino acid sequence of SEQ ID NO:516
  source 1..12: note = JCM 33374
WHWVSLGLGQPM

SEQ ID NO: 1477 - protein, 11 aa, Metschnikowia sp.
  REGION 1..11: note = Amino acid sequence of SEQ ID NO:517
  source 1..11: note = JCM 33374
WHWVSLGLGQP

SEQ ID NO: 1478 - protein, 13 aa, Saccharomyces cerevisiae
  REGION 1..13: note = Amino acid sequence of SEQ ID NO:518
WHWLNLRPGQPMY

SEQ ID NO: 1479 - protein, 13 aa, Saccharomyces cerevisiae
  REGION 1..13: note = Amino acid sequence of SEQ ID NO:519
WHWLQLKPGQPMY

SEQ ID NO: 1480 - protein, 13 aa, Saccharomyces cerevisiae
  REGION 1..13: note = Amino acid sequence of SEQ ID NO:520
WHWLNLRPGQPMY

SEQ ID NO: 1481 - protein, 13 aa, Saccharomyces cerevisiae
  REGION 1..13: note = Amino acid sequence of SEQ ID NO:521
WHWLQLKPGQPMY

SEQ ID NO: 1482 - protein, 13 aa, Saccharomyces cerevisiae
  REGION 1..13: note = Amino acid sequence of SEQ ID NO:522
WHWLNLRPGQPMY

SEQ ID NO: 1483 - protein, 13 aa, Saccharomyces cerevisiae
  REGION 1..13: note = Amino acid sequence of SEQ ID NO:523
WHWLQLKPGQPMY

SEQ ID NO: 1484 - protein, 9 aa, Monilinia fructicola
  REGION 1..9: note = Amino acid sequence of SEQ ID NO:524
WCGRPGQGC

SEQ ID NO: 1485 - protein, 10 aa, Monilinia fructicola
  REGION 1..10: note = Amino acid sequence of SEQ ID NO:525
WCGRPGQGCK

SEQ ID NO: 1486 - protein, 10 aa, Monilinia laxa
  REGION 1..10: note = Amino acid sequence of SEQ ID NO:526
WCGRPGQGCK

SEQ ID NO: 1487 - protein, 9 aa, Monilinia laxa
  REGION 1..9: note = Amino acid sequence of SEQ ID NO:527
WCGRPGQGC

SEQ ID NO: 1488 - protein, 10 aa, Colletotrichum fructicola
  REGION 1..10: note = Amino acid sequence of SEQ ID NO:528
WCTKPGQPCW

SEQ ID NO: 1489 - protein, 10 aa, Colletotrichum asianum
  REGION 1..10: note = Amino acid sequence of SEQ ID NO:529
WCTEPGQPCW

SEQ ID NO: 1490 - protein, 10 aa, Colletotrichum asianum
  REGION 1..10: note = Amino acid sequence of SEQ ID NO:530
WCTKPGQPCW

SEQ ID NO: 1491 - protein, 10 aa, Colletotrichum asianum
  REGION 1..10: note = Amino acid sequence of SEQ ID NO:531
WCTQPGQPCW

SEQ ID NO: 1492 - protein, 10 aa, Fusarium pseudograminearum
  REGION 1..10: note = Amino acid sequence of SEQ ID NO:532
WCWWKGQPCW

SEQ ID NO: 1493 - protein, 10 aa, Fusarium pseudograminearum
  REGION 1..10: note = Amino acid sequence of SEQ ID NO:533
WCTWKGQPCW

SEQ ID NO: 1494 - protein, 10 aa, Beauveria bassiana
  REGION 1..10: note = Amino acid sequence of SEQ ID NO:534
WCMRPGQPCW

SEQ ID NO: 1495 - protein, 13 aa, Saccharomyces cerevisiae
  REGION 1..13: note = Amino acid sequence of SEQ ID NO:535
WHWLQLKPGQPMY

SEQ ID NO: 1496 - protein, 13 aa, Saccharomyces cerevisiae
  REGION 1..13: note = Amino acid sequence of SEQ ID NO:536
WHWLNLRPGQPMY

SEQ ID NO: 1497 - protein, 13 aa, Saccharomyces cerevisiae
  REGION 1..13: note = Amino acid sequence of SEQ ID NO:537
WHWLQLKPGQPMY

SEQ ID NO: 1498 - protein, 13 aa, Saccharomyces cerevisiae
  REGION 1..13: note = Amino acid sequence of SEQ ID NO:538
WHWLNLRPGQPMY

SEQ ID NO: 1499 - protein, 13 aa, Saccharomyces cerevisiae
  REGION 1..13: note = Amino acid sequence of SEQ ID NO:539
WHWLQLKPGQPMY

SEQ ID NO: 1500 - protein, 13 aa, Saccharomyces cerevisiae
  REGION 1..13: note = Amino acid sequence of SEQ ID NO:540
WHWLQLKPGQPMY

SEQ ID NO: 1501 - protein, 10 aa, Verticillium dahliae
  REGION 1..10: note = Amino acid sequence of SEQ ID NO:541
PCPRPGQGCW

SEQ ID NO: 1502 - protein, 10 aa, Verticillium dahliae
  REGION 1..10: note = Amino acid sequence of SEQ ID NO:542
PCPRPGQGCW

SEQ ID NO: 1503 - protein, 10 aa, Colletotrichum gloeosporioides
  REGION 1..10: note = Amino acid sequence of SEQ ID NO:543
WCTKPGQPCW

SEQ ID NO: 1504 - protein, 11 aa, unidentified
  REGION 1..11: note = Amino acid sequence of SEQ ID NO:544 (from Candida)
WGWLRFMPGEP

SEQ ID NO: 1505 - protein, 11 aa, unidentified
  REGION 1..11: note = Amino acid sequence of SEQ ID NO:545 (from Candida)
WGWLRFMPGEP

SEQ ID NO: 1506 - protein, 13 aa, Saccharomyces cerevisiae
  REGION 1..13: note = Amino acid sequence of SEQ ID NO:546
WHWLQLKPGQPMY

SEQ ID NO: 1507 - protein, 13 aa, Saccharomyces cerevisiae
  REGION 1..13: note = Amino acid sequence of SEQ ID NO:547
WHWLNLRPGQPMY

SEQ ID NO: 1508 - protein, 13 aa, Saccharomyces cerevisiae
  REGION 1..13: note = Amino acid sequence of SEQ ID NO:548
WHWLQLKPGQPMY

SEQ ID NO: 1509 - protein, 10 aa, Fusarium beomiforme
  REGION 1..10: note = Amino acid sequence of SEQ ID NO:549
WCTWRGQPCW

SEQ ID NO: 1510 - protein, 10 aa, Fusarium beomiforme
  REGION 1..10: note = Amino acid sequence of SEQ ID NO:550
WCMWRGQPCW

SEQ ID NO: 1511 - protein, 10 aa, Fusarium beomiforme
  REGION 1..10: note = Amino acid sequence of SEQ ID NO:551
WCLWRGQPCW

SEQ ID NO: 1512 - protein, 10 aa, Colletotrichum fructicola
  REGION 1..10: note = Amino acid sequence of SEQ ID NO:552
WCTKPGQPCW

SEQ ID NO: 1513 - protein, 10 aa, Fusarium acutatum
  REGION 1..10: note = Amino acid sequence of SEQ ID NO:553
WCMWRGQPCW

SEQ ID NO: 1514 - protein, 10 aa, Fusarium acutatum
  REGION 1..10: note = Amino acid sequence of SEQ ID NO:554
WCTWRGQPCW

SEQ ID NO: 1515 - protein, 10 aa, Fusarium austroafricanum
  REGION 1..10: note = Amino acid sequence of SEQ ID NO:555
WCSWKGQPCW

SEQ ID NO: 1516 - protein, 10 aa, Fusarium albosuccineum
  REGION 1..10: note = Amino acid sequence of SEQ ID NO:556
WCIWPGQPCW

SEQ ID NO: 1517 - protein, 10 aa, Fusarium albosuccineum
  REGION 1..10: note = Amino acid sequence of SEQ ID NO:557
WCWWPGQPCW

SEQ ID NO: 1518 - protein, 8 aa, Fusarium albosuccineum
  REGION 1..8: note = Amino acid sequence of SEQ ID NO:558
WCWWPGQP

SEQ ID NO: 1519 - protein, 10 aa, Fusarium albosuccineum
  REGION 1..10: note = Amino acid sequence of SEQ ID NO:559
WCVWPGQPCW

SEQ ID NO: 1520 - protein, 10 aa, Colletotrichum fructicola
  REGION 1..10: note = Amino acid sequence of SEQ ID NO:560
  source 1..10: note = Nara gc5
WCTKPGQPCW

SEQ ID NO: 1521 - protein, 10 aa, Fusarium agapanthi
  REGION 1..10: note = Amino acid sequence of SEQ ID NO:561
WCTWRGQPCW

SEQ ID NO: 1522 - protein, 10 aa, Fusarium agapanthi
  REGION 1..10: note = Amino acid sequence of SEQ ID NO:562
WCMWRGQPCW

SEQ ID NO: 1523 - protein, 10 aa, Colletotrichum siamense
  REGION 1..10: note = Amino acid sequence of SEQ ID NO:563
WCTKPGQPCW

SEQ ID NO: 1524 - protein, 10 aa, Colletotrichum tropicale
  REGION 1..10: note = Amino acid sequence of SEQ ID NO:564
WCTKPGQPCW

SEQ ID NO: 1525 - protein, 10 aa, Colletotrichum siamense
  REGION 1..10: note = Amino acid sequence of SEQ ID NO:565
WCTKPGQPCW

SEQ ID NO: 1526 - protein, 10 aa, Colletotrichum siamense
  REGION 1..10: note = Amino acid sequence of SEQ ID NO:566
WCTKPGQPCW

SEQ ID NO: 1527 - protein, 10 aa, Colletotrichum siamense
  REGION 1..10: note = Amino acid sequence of SEQ ID NO:567
WCTKPGQPCW

SEQ ID NO: 1528 - protein, 10 aa, Colletotrichum fructicola
  REGION 1..10: note = Amino acid sequence of SEQ ID NO:568
WCTKPGQPCW

SEQ ID NO: 1529 - protein, 10 aa, Colletotrichum fructicola
  REGION 1..10: note = Amino acid sequence of SEQ ID NO:569
WCTKPGQPCW

SEQ ID NO: 1530 - protein, 10 aa, Colletotrichum viniferum
  REGION 1..10: note = Amino acid sequence of SEQ ID NO:570
WCTEPGQPCW

SEQ ID NO: 1531 - protein, 10 aa, Colletotrichum viniferum
  REGION 1..10: note = Amino acid sequence of SEQ ID NO:571
WCTKPGQPCW

SEQ ID NO: 1532 - protein, 10 aa, Colletotrichum fructicola
  REGION 1..10: note = Amino acid sequence of SEQ ID NO:572
WCTKPGQPCW

SEQ ID NO: 1533 - protein, 10 aa, Fusarium gaditjirri
  REGION 1..10: note = Amino acid sequence of SEQ ID NO:573
WCTWRGQPCW

SEQ ID NO: 1534 - protein, 10 aa, Fusarium gaditjirri
  REGION 1..10: note = Amino acid sequence of SEQ ID NO:574
WCLWRGQPCW

SEQ ID NO: 1535 - protein, 10 aa, Fusarium zealandicum
  REGION 1..10: note = Amino acid sequence of SEQ ID NO:575
WCTRPGQSCW

SEQ ID NO: 1536 - protein, 10 aa, Fusarium decemcellulare
  REGION 1..10: note = Amino acid sequence of SEQ ID NO:576
WCIWPGQPCW

SEQ ID NO: 1537 - protein, 10 aa, Fusarium decemcellulare
  REGION 1..10: note = Amino acid sequence of SEQ ID NO:577
WCVWPGQPCW

SEQ ID NO: 1538 - protein, 10 aa, Fusarium decemcellulare
  REGION 1..10: note = Amino acid sequence of SEQ ID NO:578
WCWWPGQPCW

SEQ ID NO: 1539 - protein, 10 aa, Fusarium heterosporum
  REGION 1..10: note = Amino acid sequence of SEQ ID NO:579
WCTMPGQPCW

SEQ ID NO: 1540 - protein, 10 aa, Metarhizium anisopliae
  REGION 1..10: note = Amino acid sequence of SEQ ID NO:580
WCGRPGQPCW

SEQ ID NO: 1541 - protein, 10 aa, Metarhizium anisopliae
  REGION 1..10: note = Amino acid sequence of SEQ ID NO:581
WCWRPGQPCW

SEQ ID NO: 1542 - protein, 10 aa, Fusarium anthophilum
  REGION 1..10: note = Amino acid sequence of SEQ ID NO:582
WCTWRGQPCW

SEQ ID NO: 1543 - protein, 10 aa, Fusarium anthophilum
  REGION 1..10: note = Amino acid sequence of SEQ ID NO:583
WCMWRGQPCW

SEQ ID NO: 1544 - protein, 10 aa, Fusarium austroamericanum
  REGION 1..10: note = Amino acid sequence of SEQ ID NO:584
WCTWKGQPCW

SEQ ID NO: 1545 - protein, 10 aa, Fusarium austroamericanum
  REGION 1..10: note = Amino acid sequence of SEQ ID NO:585
WCWWKGQPCW

SEQ ID NO: 1546 - protein, 10 aa, Fusarium oxysporum
  REGION 1..10: note = Amino acid sequence of SEQ ID NO:586
WCMWRGQPCW

SEQ ID NO: 1547 - protein, 10 aa, Fusarium oxysporum
  REGION 1..10: note = Amino acid sequence of SEQ ID NO:587
WCLWRGQPCW

SEQ ID NO: 1548 - protein, 10 aa, Fusarium oxysporum
  REGION 1..10: note = Amino acid sequence of SEQ ID NO:588
WCTWRGQPCW

SEQ ID NO: 1549 - protein, 10 aa, Colletotrichum fructicola
  REGION 1..10: note = Amino acid sequence of SEQ ID NO:589
WCTKPGQPCW

SEQ ID NO: 1550 - protein, 10 aa, Colletotrichum siamense
  REGION 1..10: note = Amino acid sequence of SEQ ID NO:590
WCTKPGQPCW

SEQ ID NO: 1551 - protein, 10 aa, Colletotrichum aenigma
  REGION 1..10: note = Amino acid sequence of SEQ ID NO:591
WCTKPGQPCW

SEQ ID NO: 1552 - protein, 10 aa, Fusarium phyllophilum
  REGION 1..10: note = Amino acid sequence of SEQ ID NO:592
WCTWRGQPCW

SEQ ID NO: 1553 - protein, 10 aa, Fusarium phyllophilum
  REGION 1..10: note = Amino acid sequence of SEQ ID NO:593
WCMWRGQPCW

SEQ ID NO: 1554 - protein, 10 aa, Fusarium mexicanum
  REGION 1..10: note = Amino acid sequence of SEQ ID NO:594
WCTWRGQPCW

SEQ ID NO: 1555 - protein, 10 aa, Fusarium mexicanum
  REGION 1..10: note = Amino acid sequence of SEQ ID NO:595
WCMWRGQPCW

SEQ ID NO: 1556 - protein, 10 aa, Fusarium napiforme
  REGION 1..10: note = Amino acid sequence of SEQ ID NO:596
WCMWRGQPCW

SEQ ID NO: 1557 - protein, 10 aa, Fusarium napiforme
  REGION 1..10: note = Amino acid sequence of SEQ ID NO:597
WCTWRGQPCW

SEQ ID NO: 1558 - protein, 10 aa, Fusarium pseudocircinatum
  REGION 1..10: note = Amino acid sequence of SEQ ID NO:598
WCTWRGQPCW

SEQ ID NO: 1559 - protein, 10 aa, Fusarium pseudocircinatum
  REGION 1..10: note = Amino acid sequence of SEQ ID NO:599
WCMWRGQPCW

SEQ ID NO: 1560 - protein, 10 aa, Fusarium pseudoanthophilum
  REGION 1..10: note = Amino acid sequence of SEQ ID NO:600
WCTWRGQPCW

SEQ ID NO: 1561 - protein, 10 aa, Fusarium pseudoanthophilum
  REGION 1..10: note = Amino acid sequence of SEQ ID NO:601
WCMWRGQPCW

SEQ ID NO: 1562 - protein, 10 aa, Fusarium subglutinans
  REGION 1..10: note = Amino acid sequence of SEQ ID NO:602
WCMWRGQPCW

SEQ ID NO: 1563 - protein, 10 aa, Fusarium subglutinans
  REGION 1..10: note = Amino acid sequence of SEQ ID NO:603
WCTWRGQPCW

SEQ ID NO: 1564 - protein, 10 aa, Fusarium sp.
  REGION 1..10: note = Amino acid sequence of SEQ ID NO:604
  source 1..10: note = NRRL 52700
WCTWPGQPCW

SEQ ID NO: 1565 - protein, 10 aa, Fusarium sp.
  REGION 1..10: note = Amino acid sequence of SEQ ID NO:605
  source 1..10: note = NRRL 52700
WCTWRGQPCW

SEQ ID NO: 1566 - protein, 10 aa, Fusarium sp.
  REGION 1..10: note = Amino acid sequence of SEQ ID NO:606
  source 1..10: note = NRRL 52700
WCMWRGQPCW

SEQ ID NO: 1567 - protein, 10 aa, Fusarium tjaetaba
  REGION 1..10: note = Amino acid sequence of SEQ ID NO:607
WCTWRGQPCW

SEQ ID NO: 1568 - protein, 10 aa, Fusarium tjaetaba
  REGION 1..10: note = Amino acid sequence of SEQ ID NO:608
WCMWRGQPCW

SEQ ID NO: 1569 - protein, 10 aa, Fusarium sp.
  REGION 1..10: note = Amino acid sequence of SEQ ID NO:609
  source 1..10: note = NRRL 25303
WCTWRGQPCW

SEQ ID NO: 1570 - protein, 10 aa, Fusarium sp.
  REGION 1..10: note = Amino acid sequence of SEQ ID NO:610
  source 1..10: note = NRRL 25303
WCMWRGQPCW

SEQ ID NO: 1571 - protein, 10 aa, Fusarium denticulatum
  REGION 1..10: note = Amino acid sequence of SEQ ID NO:611
WCMWRGQPCW

SEQ ID NO: 1572 - protein, 10 aa, Fusarium denticulatum
  REGION 1..10: note = Amino acid sequence of SEQ ID NO:612
WCTWRGQPCW

SEQ ID NO: 1573 - protein, 10 aa, Fusarium circinatum
  REGION 1..10: note = Amino acid sequence of SEQ ID NO:613
WCTWRGQPCW

SEQ ID NO: 1574 - protein, 10 aa, Fusarium circinatum
  REGION 1..10: note = Amino acid sequence of SEQ ID NO:614
WCMWRGQPCW

SEQ ID NO: 1575 - protein, 10 aa, Fusarium globosum
  REGION 1..10: note = Amino acid sequence of SEQ ID NO:615
WCTWRGQPCW

SEQ ID NO: 1576 - protein, 10 aa, Fusarium globosum
  REGION 1..10: note = Amino acid sequence of SEQ ID NO:616
WCMWRGQPCW

SEQ ID NO: 1577 - protein, 10 aa, Fusarium mundagurra
  REGION 1..10: note = Amino acid sequence of SEQ ID NO:617
WCTWRGQPCW

SEQ ID NO: 1578 - protein, 10 aa, Fusarium mundagurra
  REGION 1..10: note = Amino acid sequence of SEQ ID NO:618
WCMWRGQPCW

SEQ ID NO: 1579 - protein, 10 aa, Botrytis fragariae
  REGION 1..10: note = Amino acid sequence of SEQ ID NO:619
WCGRPGQPCK

SEQ ID NO: 1580 - protein, 9 aa, Botrytis fragariae
  REGION 1..9: note = Amino acid sequence of SEQ ID NO:620
WCGRPGQPC

SEQ ID NO: 1581 - protein, 10 aa, Fusarium coicis
  REGION 1..10: note = Amino acid sequence of SEQ ID NO:621
WCTWRGQPCW

SEQ ID NO: 1582 - protein, 10 aa, Fusarium coicis
  REGION 1..10: note = Amino acid sequence of SEQ ID NO:622
WCMWRGQPCW

SEQ ID NO: 1583 - protein, 10 aa, Fusarium bulbicola
  REGION 1..10: note = Amino acid sequence of SEQ ID NO:623
WCTWRGQPCW

SEQ ID NO: 1584 - protein, 10 aa, Fusarium bulbicola
  REGION 1..10: note = Amino acid sequence of SEQ ID NO:624
WCMWRGQPCW

SEQ ID NO: 1585 - protein, 10 aa, Fusarium oxysporum
  REGION 1..10: note = Amino acid sequence of SEQ ID NO:625
  source 1..10: note = f. sp. conglutinans
WCLWRGQPCW

SEQ ID NO: 1586 - protein, 10 aa, Fusarium oxysporum
  REGION 1..10: note = Amino acid sequence of SEQ ID NO:626
  source 1..10: note = f. sp. conglutinans
WCTWRGQPCW

SEQ ID NO: 1587 - protein, 10 aa, Fusarium oxysporum
  REGION 1..10: note = Amino acid sequence of SEQ ID NO:627
  source 1..10: note = f. sp. conglutinans
WCMWRGQPCW

SEQ ID NO: 1588 - protein, 10 aa, Ustilaginoidea virens
  REGION 1..10: note = Amino acid sequence of SEQ ID NO:628
WCDRPGQPCW

SEQ ID NO: 1589 - protein, 10 aa, Ustilaginoidea virens
  REGION 1..10: note = Amino acid sequence of SEQ ID NO:629
WCWRPGEPCW

SEQ ID NO: 1590 - protein, 10 aa, Ustilaginoidea virens
  REGION 1..10: note = Amino acid sequence of SEQ ID NO:630
WCWRPGQPCW

SEQ ID NO: 1591 - protein, 10 aa, Stachybotrys chartarum
  REGION 1..10: note = Amino acid sequence of SEQ ID NO:631
WCTRPGQPCW

SEQ ID NO: 1592 - protein, 10 aa, Stachybotrys chartarum
  REGION 1..10: note = Amino acid sequence of SEQ ID NO:632
WCVRPGQPCW

SEQ ID NO: 1593 - protein, 10 aa, Stachybotrys chartarum
  REGION 1..10: note = Amino acid sequence of SEQ ID NO:633
WCTRPGQPCW

SEQ ID NO: 1594 - protein, 10 aa, Stachybotrys chartarum
  REGION 1..10: note = Amino acid sequence of SEQ ID NO:634
WCVRPGQPCW

SEQ ID NO: 1595 - protein, 10 aa, Stachybotrys chlorohalonata
  REGION 1..10: note = Amino acid sequence of SEQ ID NO:635
WCTRPGQPCW

SEQ ID NO: 1596 - protein, 10 aa, Stachybotrys chlorohalonata
  REGION 1..10: note = Amino acid sequence of SEQ ID NO:636
WCVRPGQPCW

SEQ ID NO: 1597 - protein, 10 aa, Stachybotrys chartarum
  REGION 1..10: note = Amino acid sequence of SEQ ID NO:637
WCTRPGQPCW

SEQ ID NO: 1598 - protein, 10 aa, Stachybotrys chartarum
  REGION 1..10: note = Amino acid sequence of SEQ ID NO:638
WCVRPGQPCW

SEQ ID NO: 1599 - protein, 10 aa, Metarhizium anisopliae
  REGION 1..10: note = Amino acid sequence of SEQ ID NO:639
WCWQPGQPCW

SEQ ID NO: 1600 - protein, 10 aa, Metarhizium anisopliae
  REGION 1..10: note = Amino acid sequence of SEQ ID NO:640
WCWRPGQPCW

SEQ ID NO: 1601 - protein, 10 aa, Metarhizium anisopliae
  REGION 1..10: note = Amino acid sequence of SEQ ID NO:641
WCWAPGQPCW

SEQ ID NO: 1602 - protein, 9 aa, Pseudogymnoascus sp.
  REGION 1..9: note = Amino acid sequence of SEQ ID NO:642
  source 1..9: note = VKM F-3557
CWRPGQPCG

SEQ ID NO: 1603 - protein, 9 aa, Pseudogymnoascus sp.
  REGION 1..9: note = Amino acid sequence of SEQ ID NO:643
  source 1..9: note = VKM F-3775
CWRPGQPCG

SEQ ID NO: 1604 - protein, 9 aa, Pseudogymnoascus sp.
  REGION 1..9: note = Amino acid sequence of SEQ ID NO:644
  source 1..9: note = VKM F-4514 (FW-929)
CWRPGQPCG

SEQ ID NO: 1605 - protein, 9 aa, Pseudogymnoascus sp.
  REGION 1..9: note = Amino acid sequence of SEQ ID NO:645
  source 1..9: note = VKM F-4516 (FW-969)
CWRPGQPCG

SEQ ID NO: 1606 - protein, 9 aa, Pseudogymnoascus sp.
  REGION 1..9: note = Amino acid sequence of SEQ ID NO:646
  source 1..9: note = VKM F-4515 (FW-2607)
CWRPGQPCG

SEQ ID NO: 1607 - protein, 9 aa, Pseudogymnoascus sp.
  REGION 1..9: note = Amino acid sequence of SEQ ID NO:647
  source 1..9: note = VKM F-103
CWRPGQPCG

SEQ ID NO: 1608 - protein, 9 aa, Pseudogymnoascus sp.
  REGION 1..9: note = Amino acid sequence of SEQ ID NO:648
  source 1..9: note = VKM F-4517 (FW-2822)
CWRPGQPCG

SEQ ID NO: 1609 - protein, 9 aa, Pseudogymnoascus sp.
  REGION 1..9: note = Amino acid sequence of SEQ ID NO:649
  source 1..9: note = VKM F-4518 (FW-2643)
CWRPGQPCG

SEQ ID NO: 1610 - protein, 9 aa, Pseudogymnoascus sp.
  REGION 1..9: note = Amino acid sequence of SEQ ID NO:650
  source 1..9: note = VKM F-4519 (FW-2642)
CWRPGQPCG

SEQ ID NO: 1611 - protein, 9 aa, Pseudogymnoascus sp.
  REGION 1..9: note = Amino acid sequence of SEQ ID NO:651
  source 1..9: note = VKM F-4520 (FW-2644)
CWRPGQPCG

SEQ ID NO: 1612 - protein, 10 aa, Beauveria bassiana
  REGION 1..10: note = Amino acid sequence of SEQ ID NO:652
WCMRPGQPCW

SEQ ID NO: 1613 - protein, 10 aa, Metarhizium album
  REGION 1..10: note = Amino acid sequence of SEQ ID NO:653
WCWRPGEPCW

SEQ ID NO: 1614 - protein, 10 aa, Metarhizium album
  REGION 1..10: note = Amino acid sequence of SEQ ID NO:654
WCWRPGMPCW

SEQ ID NO: 1615 - protein, 10 aa, Metarhizium anisopliae
  REGION 1..10: note = Amino acid sequence of SEQ ID NO:655
WCWQPGQPCW

SEQ ID NO: 1616 - protein, 10 aa, Metarhizium anisopliae
  REGION 1..10: note = Amino acid sequence of SEQ ID NO:656
WCWRPGQPCW

SEQ ID NO: 1617 - protein, 10 aa, Metarhizium anisopliae
  REGION 1..10: note = Amino acid sequence of SEQ ID NO:657
WCWAPGQPCW

SEQ ID NO: 1618 - protein, 10 aa, Metarhizium brunneum
  REGION 1..10: note = Amino acid sequence of SEQ ID NO:658
WCGRPGQPCW

SEQ ID NO: 1619 - protein, 10 aa, Metarhizium brunneum
  REGION 1..10: note = Amino acid sequence of SEQ ID NO:659
WCWRPGQPCW

SEQ ID NO: 1620 - protein, 10 aa, Metarhizium guizhouense
  REGION 1..10: note = Amino acid sequence of SEQ ID NO:660
WCGAPGQPCW

SEQ ID NO: 1621 - protein, 10 aa, Metarhizium guizhouense
  REGION 1..10: note = Amino acid sequence of SEQ ID NO:661
WCWQPGQPCW

SEQ ID NO: 1622 - protein, 10 aa, Metarhizium guizhouense
  REGION 1..10: note = Amino acid sequence of SEQ ID NO:662
WCWRPGQPCW

SEQ ID NO: 1623 - protein, 10 aa, Metarhizium majus
  REGION 1..10: note = Amino acid sequence of SEQ ID NO:663
WCGAPGQPCW

SEQ ID NO: 1624 - protein, 10 aa, Metarhizium majus
  REGION 1..10: note = Amino acid sequence of SEQ ID NO:664
WCWQPGQPCW

SEQ ID NO: 1625 - protein, 10 aa, Metarhizium majus
  REGION 1..10: note = Amino acid sequence of SEQ ID NO:665
WCWRPGQPCW

SEQ ID NO: 1626 - protein, 10 aa, Metarhizium anisopliae
  REGION 1..10: note = Amino acid sequence of SEQ ID NO:666
WCWRPGQPCW

SEQ ID NO: 1627 - protein, 10 aa, Metarhizium anisopliae
  REGION 1..10: note = Amino acid sequence of SEQ ID NO:667
WCWAPGQPCW

SEQ ID NO: 1628 - protein, 10 aa, Metarhizium anisopliae
  REGION 1..10: note = Amino acid sequence of SEQ ID NO:668
WCWRPGQPCW

SEQ ID NO: 1629 - protein, 10 aa, Metarhizium anisopliae
  REGION 1..10: note = Amino acid sequence of SEQ ID NO:669
WCWAPGQPCW

SEQ ID NO: 1630 - protein, 10 aa, Diaporthe ampelina
  REGION 1..10: note = Amino acid sequence of SEQ ID NO:670
WCFWKGQGCW

SEQ ID NO: 1631 - protein, 10 aa, Fusarium fujikuroi
  REGION 1..10: note = Amino acid sequence of SEQ ID NO:671
WCMWRGQPCW

SEQ ID NO: 1632 - protein, 10 aa, Fusarium fujikuroi
  REGION 1..10: note = Amino acid sequence of SEQ ID NO:672
WCTWRGQPCW

SEQ ID NO: 1633 - protein, 10 aa, Fusarium fujikuroi
  REGION 1..10: note = Amino acid sequence of SEQ ID NO:673
WCTWRGQPCW

SEQ ID NO: 1634 - protein, 10 aa, Fusarium fujikuroi
  REGION 1..10: note = Amino acid sequence of SEQ ID NO:674
WCMWRGQPCW

SEQ ID NO: 1635 - protein, 10 aa, Fusarium fujikuroi
  REGION 1..10: note = Amino acid sequence of SEQ ID NO:675
WCTWRGQPCW

SEQ ID NO: 1636 - protein, 10 aa, Fusarium oxysporum
  REGION 1..10: note = Amino acid sequence of SEQ ID NO:676
WCLWRGQPCW

SEQ ID NO: 1637 - protein, 10 aa, Fusarium oxysporum
  REGION 1..10: note = Amino acid sequence of SEQ ID NO:677
WCTWRGQPCW

SEQ ID NO: 1638 - protein, 10 aa, Fusarium oxysporum
  REGION 1..10: note = Amino acid sequence of SEQ ID NO:678
WCMWRGQPCW

SEQ ID NO: 1639 - protein, 11 aa, unidentified
  REGION 1..11: note = Amino acid sequence of SEQ ID NO:679 (from Candida)
WGWLRFYPGEP

SEQ ID NO: 1640 - protein, 11 aa, unidentified
  REGION 1..11: note = Amino acid sequence of SEQ ID NO:680 (from Candida)
WGWLRFFPGEP

SEQ ID NO: 1641 - protein, 13 aa, Saccharomyces eubayanus
  REGION 1..13: note = Amino acid sequence of SEQ ID NO:681
WHWLKLRPGQPMY

SEQ ID NO: 1642 - protein, 13 aa, Saccharomyces eubayanus
  REGION 1..13: note = Amino acid sequence of SEQ ID NO:682
WHWLTLRPGQPMY

SEQ ID NO: 1643 - protein, 13 aa, Saccharomyces eubayanus
  REGION 1..13: note = Amino acid sequence of SEQ ID NO:683
WHWLKLRPGQPMY

SEQ ID NO: 1644 - protein, 13 aa, Saccharomyces eubayanus
  REGION 1..13: note = Amino acid sequence of SEQ ID NO:684
WHWLQLRPGQPMY

SEQ ID NO: 1645 - protein, 13 aa, Saccharomyces sp.
  REGION 1..13: note = Amino acid sequence of SEQ ID NO:685
  source 1..13: note = 'boulardii'
WHWLQLKPGQPMY

SEQ ID NO: 1646 - protein, 13 aa, Saccharomyces sp.
  REGION 1..13: note = Amino acid sequence of SEQ ID NO:686
  source 1..13: note = 'boulardii'
WHWLNLRPGQPMY

SEQ ID NO: 1647 - protein, 13 aa, Saccharomyces sp.
  REGION 1..13: note = Amino acid sequence of SEQ ID NO:687
  source 1..13: note = 'boulardii'
WHWLQLKPGQPMY

SEQ ID NO: 1648 - protein, 10 aa, Escovopsis weberi
  REGION 1..10: note = Amino acid sequence of SEQ ID NO:688
WCTNPGQGCW

SEQ ID NO: 1649 - protein, 10 aa, Fusarium langsethiae
  REGION 1..10: note = Amino acid sequence of SEQ ID NO:689
WCTWKGQPCW

SEQ ID NO: 1650 - protein, 10 aa, Fusarium langsethiae
  REGION 1..10: note = Amino acid sequence of SEQ ID NO:690
WCWWKGQPCW

SEQ ID NO: 1651 - protein, 13 aa, Saccharomyces sp.
  REGION 1..13: note = Amino acid sequence of SEQ ID NO:691
  source 1..13: note = 'boulardii'
WHWLQLKPGQPMY

SEQ ID NO: 1652 - protein, 13 aa, Saccharomyces sp.
  REGION 1..13: note = Amino acid sequence of SEQ ID NO:692
  source 1..13: note = 'boulardii'
WHWLNLRPGQPMY

SEQ ID NO: 1653 - protein, 13 aa, Saccharomyces sp.
  REGION 1..13: note = Amino acid sequence of SEQ ID NO:693
  source 1..13: note = 'boulardii'
WHWLQLKPGQPMY

SEQ ID NO: 1654 - protein, 10 aa, Drechmeria coniospora
  REGION 1..10: note = Amino acid sequence of SEQ ID NO:694
WCTRPGSGCW

SEQ ID NO: 1655 - protein, 13 aa, Saccharomyces cerevisiae
  REGION 1..13: note = Amino acid sequence of SEQ ID NO:695
WHWLQLKPGQPMY

SEQ ID NO: 1656 - protein, 13 aa, Saccharomyces cerevisiae
  REGION 1..13: note = Amino acid sequence of SEQ ID NO:696
WHWLNLRPGQPMY

SEQ ID NO: 1657 - protein, 13 aa, Saccharomyces cerevisiae
  REGION 1..13: note = Amino acid sequence of SEQ ID NO:697
WHWLQLKPGQPMY

SEQ ID NO: 1658 - protein, 10 aa, Metarhizium rileyi
  REGION 1..10: note = Amino acid sequence of SEQ ID NO:698
WCWRPGQPCW

SEQ ID NO: 1659 - protein, 9 aa, Pseudogymnoascus destructans
  REGION 1..9: note = Amino acid sequence of SEQ ID NO:699
CWRPGQPCG

SEQ ID NO: 1660 - protein, 9 aa, Pochonia chlamydosporia
  REGION 1..9: note = Amino acid sequence of SEQ ID NO:700
  source 1..9: note = 170
WCWRPGEPC

SEQ ID NO: 1661 - protein, 10 aa, Pochonia chlamydosporia
  REGION 1..10: note = Amino acid sequence of SEQ ID NO:701
  source 1..10: note = 170
WCWRPGQSCW

SEQ ID NO: 1662 - protein, 10 aa, Pochonia chlamydosporia
  REGION 1..10: note = Amino acid sequence of SEQ ID NO:702
  source 1..10: note = 170
WCWRPGQPCW

SEQ ID NO: 1663 - protein, 10 aa, Purpureocillium lilacinum
  REGION 1..10: note = Amino acid sequence of SEQ ID NO:703
WCTRPGQPCK

SEQ ID NO: 1664 - protein, 10 aa, Purpureocillium lilacinum
  REGION 1..10: note = Amino acid sequence of SEQ ID NO:704
WCTRRGQPCK

SEQ ID NO: 1665 - protein, 10 aa, Purpureocillium lilacinum
  REGION 1..10: note = Amino acid sequence of SEQ ID NO:705
WCTRPGQPCK

SEQ ID NO: 1666 - protein, 10 aa, Purpureocillium lilacinum
  REGION 1..10: note = Amino acid sequence of SEQ ID NO:706
WCTRRGQPCK

SEQ ID NO: 1667 - protein, 11 aa, Metschnikowia bicuspidata
  REGION 1..11: note = Amino acid sequence of SEQ ID NO:707
  source 1..11: note = var. bicuspidata NRRL YB-4993
WHWVRLKIGQP

SEQ ID NO: 1668 - protein, 11 aa, Metschnikowia bicuspidata
  REGION 1..11: note = Amino acid sequence of SEQ ID NO:708
  source 1..11: note = var. bicuspidata NRRL YB-4993
WHWVALKIGQP

SEQ ID NO: 1669 - protein, 13 aa, Metschnikowia bicuspidata
  REGION 1..13: note = Amino acid sequence of SEQ ID NO:709
  source 1..13: note = var. bicuspidata NRRL YB-4993
WHWVALKIGQPFF

SEQ ID NO: 1670 - protein, 11 aa, Metschnikowia bicuspidata
  REGION 1..11: note = Amino acid sequence of SEQ ID NO:710
  source 1..11: note = var. bicuspidata NRRL YB-4993
WHWVALKIGQP

SEQ ID NO: 1671 - protein, 10 aa, Fusarium poae
  REGION 1..10: note = Amino acid sequence of SEQ ID NO:711
WCTWKGQPCW

SEQ ID NO: 1672 - protein, 10 aa, Fusarium poae
  REGION 1..10: note = Amino acid sequence of SEQ ID NO:712
WCWWKGQPCW

SEQ ID NO: 1673 - protein, 9 aa, Pseudogymnoascus sp.
  REGION 1..9: note = Amino acid sequence of SEQ ID NO:713
  source 1..9: note = WSF 3629
CWRPGQPCG

SEQ ID NO: 1674 - protein, 9 aa, Pseudogymnoascus sp.
  REGION 1..9: note = Amino acid sequence of SEQ ID NO:714
  source 1..9: note = 24MN13
CWRPGQPCG

SEQ ID NO: 1675 - protein, 9 aa, Pseudogymnoascus sp.
  REGION 1..9: note = Amino acid sequence of SEQ ID NO:715
  source 1..9: note = 23342-1-I1
CWRPGQPCG

SEQ ID NO: 1676 - protein, 9 aa, Pseudogymnoascus sp.
  REGION 1..9: note = Amino acid sequence of SEQ ID NO:716
  source 1..9: note = 05NY08
CWRPGQPCG

SEQ ID NO: 1677 - protein, 9 aa, Pseudogymnoascus sp.
  REGION 1..9: note = Amino acid sequence of SEQ ID NO:717
  source 1..9: note = 03VT05
CWRPGQPCG

SEQ ID NO: 1678 - protein, 9 aa, Pseudogymnoascus verrucosus
  REGION 1..9: note = Amino acid sequence of SEQ ID NO:718
CWRPGQPCG

SEQ ID NO: 1679 - protein, 10 aa, Drechmeria coniospora
  REGION 1..10: note = Amino acid sequence of SEQ ID NO:719
WCTRPGSGCW

SEQ ID NO: 1680 - protein, 13 aa, Hanseniaspora osmophila
  REGION 1..13: note = Amino acid sequence of SEQ ID NO:720
WHWLKFDVGEPLY

SEQ ID NO: 1681 - protein, 13 aa, Hanseniaspora osmophila
  REGION 1..13: note = Amino acid sequence of SEQ ID NO:721
WHWLKFDVGEPLY

SEQ ID NO: 1682 - protein, 9 aa, Penicilliopsis zonata
  REGION 1..9: note = Amino acid sequence of SEQ ID NO:722
  source 1..9: note = CBS 506.65
WCWQPGQGC

SEQ ID NO: 1683 - protein, 13 aa, Saccharomyces cerevisiae
  REGION 1..13: note = Amino acid sequence of SEQ ID NO:723
WHWLNLRPGQPMY

SEQ ID NO: 1684 - protein, 13 aa, Saccharomyces cerevisiae
  REGION 1..13: note = Amino acid sequence of SEQ ID NO:724
WHWLQLKPGQPMY

SEQ ID NO: 1685 - protein, 13 aa, Saccharomyces cerevisiae
  REGION 1..13: note = Amino acid sequence of SEQ ID NO:725
WHWLQLKPGQPMY

SEQ ID NO: 1686 - protein, 10 aa, Fusarium graminearum
  REGION 1..10: note = Amino acid sequence of SEQ ID NO:726
WCTWKGQPCW

SEQ ID NO: 1687 - protein, 10 aa, Fusarium graminearum
  REGION 1..10: note = Amino acid sequence of SEQ ID NO:727
WCWWKGQPCW

SEQ ID NO: 1688 - protein, 10 aa, Fusarium oxysporum
  REGION 1..10: note = Amino acid sequence of SEQ ID NO:728
  source 1..10: note = f. sp. radicis-cucumerinum
WCLWRGQPCW

SEQ ID NO: 1689 - protein, 10 aa, Fusarium oxysporum
  REGION 1..10: note = Amino acid sequence of SEQ ID NO:729
  source 1..10: note = f. sp. radicis-cucumerinum
WCTWRGQPCW

SEQ ID NO: 1690 - protein, 10 aa, Fusarium oxysporum
  REGION 1..10: note = Amino acid sequence of SEQ ID NO:730
  source 1..10: note = f. sp. radicis-cucumerinum
WCMWRGQPCW

SEQ ID NO: 1691 - protein, 11 aa, unidentified
  REGION 1..11: note = Amino acid sequence of SEQ ID NO:731 (from Candida)
WGWLRFYPGEP

SEQ ID NO: 1692 - protein, 11 aa, unidentified
  REGION 1..11: note = Amino acid sequence of SEQ ID NO:732 (from Candida)
WGWLRFFPGEP

SEQ ID NO: 1693 - protein, 11 aa, unidentified
  REGION 1..11: note = Amino acid sequence of SEQ ID NO:733 (from Candida)
WGWLRFYPGEP

SEQ ID NO: 1694 - protein, 11 aa, unidentified
  REGION 1..11: note = Amino acid sequence of SEQ ID NO:734 (from Candida)
WGWLRFFPGEP

SEQ ID NO: 1695 - protein, 13 aa, Saccharomyces cerevisiae
  REGION 1..13: note = Amino acid sequence of SEQ ID NO:735
WHWLNLRPGQPMY

SEQ ID NO: 1696 - protein, 13 aa, Saccharomyces cerevisiae
  REGION 1..13: note = Amino acid sequence of SEQ ID NO:736
WHWLQLKPGQPMY

SEQ ID NO: 1697 - protein, 13 aa, Saccharomyces cerevisiae
  REGION 1..13: note = Amino acid sequence of SEQ ID NO:737
WHWLQLKPGQPMY

SEQ ID NO: 1698 - protein, 10 aa, Beauveria bassiana
  REGION 1..10: note = Amino acid sequence of SEQ ID NO:738
WCMRPGQPCW

SEQ ID NO: 1699 - protein, 10 aa, Verticillium dahliae
  REGION 1..10: note = Amino acid sequence of SEQ ID NO:739
PCPRPGQGCW

SEQ ID NO: 1700 - protein, 10 aa, Verticillium dahliae
  REGION 1..10: note = Amino acid sequence of SEQ ID NO:740
PCPRPGQGCW

SEQ ID NO: 1701 - protein, 10 aa, Verticillium dahliae
  REGION 1..10: note = Amino acid sequence of SEQ ID NO:741
PCPRPGQGCW

SEQ ID NO: 1702 - protein, 10 aa, Verticillium dahliae
  REGION 1..10: note = Amino acid sequence of SEQ ID NO:742
PCPRPGQGCW

SEQ ID NO: 1703 - protein, 10 aa, Verticillium dahliae
  REGION 1..10: note = Amino acid sequence of SEQ ID NO:743
PCPRPGQGCW

SEQ ID NO: 1704 - protein, 10 aa, Fusarium nygamai
  REGION 1..10: note = Amino acid sequence of SEQ ID NO:744
WCTWRGQPCW

SEQ ID NO: 1705 - protein, 10 aa, Fusarium nygamai
  REGION 1..10: note = Amino acid sequence of SEQ ID NO:745
WCMWRGQPCW

SEQ ID NO: 1706 - protein, 9 aa, Rutstroemia sp.
  REGION 1..9: note = Amino acid sequence of SEQ ID NO:746
  source 1..9: note = NJR-2017a BVV2
WCGRPGQPC

SEQ ID NO: 1707 - protein, 10 aa, Rutstroemia sp.
  REGION 1..10: note = Amino acid sequence of SEQ ID NO:747
  source 1..10: note = NJR-2017a BVV2
WCGRPGQPCK

SEQ ID NO: 1708 - protein, 10 aa, Rutstroemia sp.
  REGION 1..10: note = Amino acid sequence of SEQ ID NO:748
  source 1..10: note = NJR-2017a BBW
WCGRPGQPCK

SEQ ID NO: 1709 - protein, 9 aa, Rutstroemia sp.
  REGION 1..9: note = Amino acid sequence of SEQ ID NO:749
  source 1..9: note = NJR-2017a BBW
WCGRPGQPC

SEQ ID NO: 1710 - protein, 9 aa, Rutstroemia sp.
  REGION 1..9: note = Amino acid sequence of SEQ ID NO:750
  source 1..9: note = NJR-2017a WRK4
WCGRPGQPC

SEQ ID NO: 1711 - protein, 10 aa, Rutstroemia sp.
  REGION 1..10: note = Amino acid sequence of SEQ ID NO:751
  source 1..10: note = NJR-2017a WRK4
WCGRPGQPCK

SEQ ID NO: 1712 - protein, 11 aa, unidentified
  REGION 1..11: note = Amino acid sequence of SEQ ID NO:752 (from Candida)
WGWLRFMPGEP

SEQ ID NO: 1713 - protein, 11 aa, unidentified
  REGION 1..11: note = Amino acid sequence of SEQ ID NO:753 (from Candida)
WGWLRFYPGEP

SEQ ID NO: 1714 - protein, 10 aa, unidentified
  REGION 1..10: note = Amino acid sequence of SEQ ID NO:754 (from Candida)
WGWLRFFPGE

SEQ ID NO: 1715 - protein, 11 aa, unidentified
  REGION 1..11: note = Amino acid sequence of SEQ ID NO:755 (from Candida)
WGWLRFFPGEP

SEQ ID NO: 1716 - protein, 10 aa, Fusarium culmorum
  REGION 1..10: note = Amino acid sequence of SEQ ID NO:756
WCWWKGQPCW

SEQ ID NO: 1717 - protein, 10 aa, Fusarium culmorum
  REGION 1..10: note = Amino acid sequence of SEQ ID NO:757
WCTWKGQPCW

SEQ ID NO: 1718 - protein, 13 aa, Saccharomyces cerevisiae
  REGION 1..13: note = Amino acid sequence of SEQ ID NO:758
WHWLNLRPGQPMY

SEQ ID NO: 1719 - protein, 13 aa, Saccharomyces cerevisiae
  REGION 1..13: note = Amino acid sequence of SEQ ID NO:759
WHWLQLKPGQPMY

SEQ ID NO: 1720 - protein, 13 aa, Saccharomyces cerevisiae
  REGION 1..13: note = Amino acid sequence of SEQ ID NO:760
WHWLNLRPGQPMY

SEQ ID NO: 1721 - protein, 13 aa, Saccharomyces cerevisiae
  REGION 1..13: note = Amino acid sequence of SEQ ID NO:761
WHWLQLKPGQPMY

SEQ ID NO: 1722 - protein, 13 aa, Saccharomyces cerevisiae
  REGION 1..13: note = Amino acid sequence of SEQ ID NO:762
WHWLQLKPGQPMY

SEQ ID NO: 1723 - protein, 13 aa, Saccharomyces cerevisiae
  REGION 1..13: note = Amino acid sequence of SEQ ID NO:763
WHWLQLKPGQPMY

SEQ ID NO: 1724 - protein, 13 aa, Saccharomyces cerevisiae
  REGION 1..13: note = Amino acid sequence of SEQ ID NO:764
WHWLNLRPGQPMY

SEQ ID NO: 1725 - protein, 13 aa, Saccharomyces cerevisiae
  REGION 1..13: note = Amino acid sequence of SEQ ID NO:765
WHWLQLKPGQPMY

SEQ ID NO: 1726 - protein, 13 aa, Saccharomyces cerevisiae
  REGION 1..13: note = Amino acid sequence of SEQ ID NO:766
WHWLQLKPGQPMY

SEQ ID NO: 1727 - protein, 11 aa, unidentified
  REGION 1..11: note = Amino acid sequence of SEQ ID NO:767 (from Candida)
WGWLRFMPGEP

SEQ ID NO: 1728 - protein, 11 aa, unidentified
  REGION 1..11: note = Amino acid sequence of SEQ ID NO:768 (from Candida)
WGWLRFMPGEP

SEQ ID NO: 1729 - protein, 10 aa, Purpureocillium lilacinum
  REGION 1..10: note = Amino acid sequence of SEQ ID NO:769
WCTRPGQPCK

SEQ ID NO: 1730 - protein, 10 aa, Purpureocillium lilacinum
  REGION 1..10: note = Amino acid sequence of SEQ ID NO:770
WCTRRGQPCK

SEQ ID NO: 1731 - protein, 12 aa, Metschnikowia aff. pulcherrima
  REGION 1..12: note = Amino acid sequence of SEQ ID NO:771
WHWGRLRMGQPV

SEQ ID NO: 1732 - protein, 13 aa, Metschnikowia aff. pulcherrima
  REGION 1..13: note = Amino acid sequence of SEQ ID NO:772
WHWGRLRMGQPFY

SEQ ID NO: 1733 - protein, 13 aa, Metschnikowia aff. pulcherrima
  REGION 1..13: note = Amino acid sequence of SEQ ID NO:773
WHWGRLRMGQPMY

SEQ ID NO: 1734 - protein, 11 aa, Metschnikowia aff. pulcherrima
  REGION 1..11: note = Amino acid sequence of SEQ ID NO:774
WHWGRLRMGQP

SEQ ID NO: 1735 - protein, 10 aa, Pyricularia oryzae
  REGION 1..10: note = Amino acid sequence of SEQ ID NO:775
WCPRRGQPCW

SEQ ID NO: 1736 - protein, 11 aa, unidentified
  REGION 1..11: note = Amino acid sequence of SEQ ID NO:776 (from Candida)
WGWLRFYPGEP

SEQ ID NO: 1737 - protein, 10 aa, unidentified
  REGION 1..10: note = Amino acid sequence of SEQ ID NO:777 (from Candida)
WGWLRFFPGE

SEQ ID NO: 1738 - protein, 11 aa, unidentified
  REGION 1..11: note = Amino acid sequence of SEQ ID NO:778 (from Candida)
WGWLRFFPGEP

SEQ ID NO: 1739 - protein, 11 aa, unidentified
  REGION 1..11: note = Amino acid sequence of SEQ ID NO:779 (from Candida)
WGWLRFYPGEP

SEQ ID NO: 1740 - protein, 11 aa, unidentified
  REGION 1..11: note = Amino acid sequence of SEQ ID NO:780 (from Candida)
WGWLRFFPGEP

SEQ ID NO: 1741 - protein, 12 aa, Kluyveromyces lactis
  REGION 1..12: note = Amino acid sequence of SEQ ID NO:781
WSWITLRPGQPI

SEQ ID NO: 1742 - protein, 10 aa, Fusarium fujikuroi
  REGION 1..10: note = Amino acid sequence of SEQ ID NO:782
WCTWRGQPCW

SEQ ID NO: 1743 - protein, 10 aa, Fusarium fujikuroi
  REGION 1..10: note = Amino acid sequence of SEQ ID NO:783
WCMWRGQPCW

SEQ ID NO: 1744 - protein, 10 aa, Fusarium fujikuroi
  REGION 1..10: note = Amino acid sequence of SEQ ID NO:784
WCTWRGQPCW

SEQ ID NO: 1745 - protein, 10 aa, Fusarium fujikuroi
  REGION 1..10: note = Amino acid sequence of SEQ ID NO:785
WCMWRGQPCW

SEQ ID NO: 1746 - protein, 10 aa, Fusarium fujikuroi
  REGION 1..10: note = Amino acid sequence of SEQ ID NO:786
WCMWRGQPCW

SEQ ID NO: 1747 - protein, 10 aa, Fusarium fujikuroi
  REGION 1..10: note = Amino acid sequence of SEQ ID NO:787
WCTWRGQPCW

SEQ ID NO: 1748 - protein, 13 aa, Kluyveromyces marxianus
  REGION 1..13: note = Amino acid sequence of SEQ ID NO:788
WKWLSFRVGQPIY

SEQ ID NO: 1749 - protein, 12 aa, Kluyveromyces marxianus
  REGION 1..12: note = Amino acid sequence of SEQ ID NO:789
WKWLSFRVGQPI

SEQ ID NO: 1750 - protein, 13 aa, Kluyveromyces marxianus
  REGION 1..13: note = Amino acid sequence of SEQ ID NO:790
WKWLSFRIGQPIY

SEQ ID NO: 1751 - protein, 12 aa, Kluyveromyces marxianus
  REGION 1..12: note = Amino acid sequence of SEQ ID NO:791
WKWLSFRIGQPI

SEQ ID NO: 1752 - protein, 13 aa, Kluyveromyces marxianus
  REGION 1..13: note = Amino acid sequence of SEQ ID NO:792
WKWLSLRVGQPIY

SEQ ID NO: 1753 - protein, 12 aa, Kluyveromyces marxianus
  REGION 1..12: note = Amino acid sequence of SEQ ID NO:793
WKWLSLRVGQPI

SEQ ID NO: 1754 - protein, 11 aa, Kluyveromyces marxianus
  REGION 1..11: note = Amino acid sequence of SEQ ID NO:794
WLSFRVGQPIY

SEQ ID NO: 1755 - protein, 13 aa, Kluyveromyces marxianus
  REGION 1..13: note = Amino acid sequence of SEQ ID NO:795
WEWLSLRVGQPLY

SEQ ID NO: 1756 - protein, 11 aa, Kluyveromyces marxianus
  REGION 1..11: note = Amino acid sequence of SEQ ID NO:796
WEWLSLRVGQP

SEQ ID NO: 1757 - protein, 11 aa, Kluyveromyces marxianus
  REGION 1..11: note = Amino acid sequence of SEQ ID NO:797
WLSFRIGQPIY

SEQ ID NO: 1758 - protein, 11 aa, Kluyveromyces marxianus
  REGION 1..11: note = Amino acid sequence of SEQ ID NO:798
WLSLRVGQPIY

SEQ ID NO: 1759 - protein, 13 aa, Saccharomyces cerevisiae
  REGION 1..13: note = Amino acid sequence of SEQ ID NO:799
WHWLNLRPGQPMY

SEQ ID NO: 1760 - protein, 13 aa, Saccharomyces cerevisiae
  REGION 1..13: note = Amino acid sequence of SEQ ID NO:800
WHWLQLKPGQPMY

SEQ ID NO: 1761 - protein, 13 aa, Saccharomyces cerevisiae
  REGION 1..13: note = Amino acid sequence of SEQ ID NO:801
WHWLQLKPGQPMY

SEQ ID NO: 1762 - protein, 13 aa, Saccharomyces paradoxus
  REGION 1..13: note = Amino acid sequence of SEQ ID NO:802
WHWLNLRPGQPMY

SEQ ID NO: 1763 - protein, 13 aa, Saccharomyces paradoxus
  REGION 1..13: note = Amino acid sequence of SEQ ID NO:803
WHWLQLKPGQPMY

SEQ ID NO: 1764 - protein, 13 aa, Saccharomyces paradoxus
  REGION 1..13: note = Amino acid sequence of SEQ ID NO:804
WHWLQLKPGQPMY

SEQ ID NO: 1765 - protein, 13 aa, Saccharomyces pastorianus
  REGION 1..13: note = Amino acid sequence of SEQ ID NO:805
WHWLNLRPGQPMY

SEQ ID NO: 1766 - protein, 13 aa, Saccharomyces pastorianus
  REGION 1..13: note = Amino acid sequence of SEQ ID NO:806
WHWLQLKPGQPMY

SEQ ID NO: 1767 - protein, 13 aa, Saccharomyces pastorianus
  REGION 1..13: note = Amino acid sequence of SEQ ID NO:807
WHWLQLKPGQPMY

SEQ ID NO: 1768 - protein, 13 aa, Saccharomyces pastorianus
  REGION 1..13: note = Amino acid sequence of SEQ ID NO:808
WHWLQFKPGQPMY

SEQ ID NO: 1769 - protein, 13 aa, Saccharomyces pastorianus
  REGION 1..13: note = Amino acid sequence of SEQ ID NO:809
WHWLKLRPGQPMY

SEQ ID NO: 1770 - protein, 13 aa, Saccharomyces pastorianus
  REGION 1..13: note = Amino acid sequence of SEQ ID NO:810
WHWLQLRPGQPMY

SEQ ID NO: 1771 - protein, 13 aa, Saccharomyces pastorianus
  REGION 1..13: note = Amino acid sequence of SEQ ID NO:811
WHWLKLRPGQPMY

SEQ ID NO: 1772 - protein, 13 aa, Saccharomyces pastorianus
  REGION 1..13: note = Amino acid sequence of SEQ ID NO:812
WHWLTLRPGQPMY

SEQ ID NO: 1773 - protein, 10 aa, Fusarium oxysporum
  REGION 1..10: note = Amino acid sequence of SEQ ID NO:813
  source 1..10: note = Fo47
WCTWRGQPCW

SEQ ID NO: 1774 - protein, 10 aa, Fusarium oxysporum
  REGION 1..10: note = Amino acid sequence of SEQ ID NO:814
  source 1..10: note = Fo47
WCMWRGQPCW

SEQ ID NO: 1775 - protein, 10 aa, Fusarium oxysporum
  REGION 1..10: note = Amino acid sequence of SEQ ID NO:815
  source 1..10: note = Fo47
WCLWRGQPCW

SEQ ID NO: 1776 - protein, 12 aa, Zygotorulaspora mrakii
  REGION 1..12: note = Amino acid sequence of SEQ ID NO:816
WHWIRLSRGAPI

SEQ ID NO: 1777 - protein, 12 aa, Zygotorulaspora mrakii
  REGION 1..12: note = Amino acid sequence of SEQ ID NO:817
WHWIQLGKGAPI

SEQ ID NO: 1778 - protein, 12 aa, Zygotorulaspora mrakii
  REGION 1..12: note = Amino acid sequence of SEQ ID NO:818
WHWIRLGRGAPI

SEQ ID NO: 1779 - protein, 10 aa, Metarhizium brunneum
  REGION 1..10: note = Amino acid sequence of SEQ ID NO:819
WCGRPGQPCW

SEQ ID NO: 1780 - protein, 10 aa, Metarhizium brunneum
  REGION 1..10: note = Amino acid sequence of SEQ ID NO:820
WCWRPGQPCW

SEQ ID NO: 1781 - protein, 13 aa, Torulaspora globosa
  REGION 1..13: note = Amino acid sequence of SEQ ID NO:821
WHWISLRAGQPMY

SEQ ID NO: 1782 - protein, 12 aa, Torulaspora globosa
  REGION 1..12: note = Amino acid sequence of SEQ ID NO:822
WHWISLRAGQPM

SEQ ID NO: 1783 - protein, 11 aa, Torulaspora globosa
  REGION 1..11: note = Amino acid sequence of SEQ ID NO:823
WHWISLRAGQP

SEQ ID NO: 1784 - protein, 13 aa, Torulaspora globosa
  REGION 1..13: note = Amino acid sequence of SEQ ID NO:824
WHWISLRTGQPMY

SEQ ID NO: 1785 - protein, 12 aa, Torulaspora globosa
  REGION 1..12: note = Amino acid sequence of SEQ ID NO:825
WHWISLRTGQPM

SEQ ID NO: 1786 - protein, 11 aa, Torulaspora globosa
  REGION 1..11: note = Amino acid sequence of SEQ ID NO:826
WHWISLRTGQP

SEQ ID NO: 1787 - protein, 13 aa, Torulaspora globosa
  REGION 1..13: note = Amino acid sequence of SEQ ID NO:827
WHWISLRTGQPMY

SEQ ID NO: 1788 - protein, 12 aa, Torulaspora globosa
  REGION 1..12: note = Amino acid sequence of SEQ ID NO:828
WHWISLRTGQPM

SEQ ID NO: 1789 - protein, 11 aa, Torulaspora globosa
  REGION 1..11: note = Amino acid sequence of SEQ ID NO:829
WHWISLRTGQP

SEQ ID NO: 1790 - protein, 10 aa, Monilinia fructigena
  REGION 1..10: note = Amino acid sequence of SEQ ID NO:830
WCGRPGQGCK

SEQ ID NO: 1791 - protein, 9 aa, Monilinia fructigena
  REGION 1..9: note = Amino acid sequence of SEQ ID NO:831
WCGRPGQGC

SEQ ID NO: 1792 - protein, 10 aa, Fusarium proliferatum
  REGION 1..10: note = Amino acid sequence of SEQ ID NO:832
WCMWRGQPCW

SEQ ID NO: 1793 - protein, 10 aa, Fusarium proliferatum
  REGION 1..10: note = Amino acid sequence of SEQ ID NO:833
WCTWRGQPCW

SEQ ID NO: 1794 - protein, 10 aa, Verticillium dahliae
  REGION 1..10: note = Amino acid sequence of SEQ ID NO:834
PCPRPGQGCW

SEQ ID NO: 1795 - protein, 10 aa, Fusarium verticillioides
  REGION 1..10: note = Amino acid sequence of SEQ ID NO:835
WCTWRGQPCW

SEQ ID NO: 1796 - protein, 10 aa, Fusarium verticillioides
  REGION 1..10: note = Amino acid sequence of SEQ ID NO:836
WCMWRGQPCW

SEQ ID NO: 1797 - protein, 9 aa, Fusarium coffeatum
  REGION 1..9: note = Amino acid sequence of SEQ ID NO:837
WCTWKGQPC

SEQ ID NO: 1798 - protein, 10 aa, Fusarium coffeatum
  REGION 1..10: note = Amino acid sequence of SEQ ID NO:838
WCLWKGQPCW

SEQ ID NO: 1799 - protein, 10 aa, Fusarium coffeatum
  REGION 1..10: note = Amino acid sequence of SEQ ID NO:839
WCWWKGQPCW

SEQ ID NO: 1800 - protein, 10 aa, Fusarium coffeatum
  REGION 1..10: note = Amino acid sequence of SEQ ID NO:840
WCTWKGQPCW

SEQ ID NO: 1801 - protein, 10 aa, Fusarium flagelliforme
  REGION 1..10: note = Amino acid sequence of SEQ ID NO:841
WCWIKGQPCW

SEQ ID NO: 1802 - protein, 10 aa, Fusarium flagelliforme
  REGION 1..10: note = Amino acid sequence of SEQ ID NO:842
WCWIKGQPCW

SEQ ID NO: 1803 - protein, 10 aa, Fusarium sporotrichioides
  REGION 1..10: note = Amino acid sequence of SEQ ID NO:843
WCTWKGQPCW

SEQ ID NO: 1804 - protein, 10 aa, Fusarium sporotrichioides
  REGION 1..10: note = Amino acid sequence of SEQ ID NO:844
WCWWKGQPCW

SEQ ID NO: 1805 - protein, 10 aa, Fusarium longipes
  REGION 1..10: note = Amino acid sequence of SEQ ID NO:845
WCTWKGQPCW

SEQ ID NO: 1806 - protein, 10 aa, Fusarium longipes
  REGION 1..10: note = Amino acid sequence of SEQ ID NO:846
WCWWKGQPCW

SEQ ID NO: 1807 - protein, 10 aa, Fusarium oxysporum
  REGION 1..10: note = Amino acid sequence of SEQ ID NO:847
  source 1..10: note = f. sp. cepae
WCLWRGQPCW

SEQ ID NO: 1808 - protein, 10 aa, Fusarium oxysporum
  REGION 1..10: note = Amino acid sequence of SEQ ID NO:848
  source 1..10: note = f. sp. cepae
WCTWRGQPCW

SEQ ID NO: 1809 - protein, 10 aa, Fusarium oxysporum
  REGION 1..10: note = Amino acid sequence of SEQ ID NO:849
  source 1..10: note = f. sp. cepae
WCMWRGQPCW

SEQ ID NO: 1810 - protein, 10 aa, Fusarium oxysporum
  REGION 1..10: note = Amino acid sequence of SEQ ID NO:850
  source 1..10: note = f. sp. cepae
WCMWRGQPCW

SEQ ID NO: 1811 - protein, 10 aa, Fusarium oxysporum
  REGION 1..10: note = Amino acid sequence of SEQ ID NO:851
  source 1..10: note = f. sp. cepae
WCLWRGQPCW

SEQ ID NO: 1812 - protein, 10 aa, Fusarium oxysporum
  REGION 1..10: note = Amino acid sequence of SEQ ID NO:852
  source 1..10: note = f. sp. cepae
WCTWRGQPCW

SEQ ID NO: 1813 - protein, 10 aa, Fusarium oxysporum
  REGION 1..10: note = Amino acid sequence of SEQ ID NO:853
  source 1..10: note = f. sp. cepae
WCMWRGQPCW

SEQ ID NO: 1814 - protein, 10 aa, Fusarium oxysporum
  REGION 1..10: note = Amino acid sequence of SEQ ID NO:854
  source 1..10: note = f. sp. cepae
WCLWRGQPCW

SEQ ID NO: 1815 - protein, 10 aa, Fusarium oxysporum
  REGION 1..10: note = Amino acid sequence of SEQ ID NO:855
  source 1..10: note = f. sp. cepae
WCTWRGQPCW

SEQ ID NO: 1816 - protein, 10 aa, Fusarium oxysporum
  REGION 1..10: note = Amino acid sequence of SEQ ID NO:856
WCMWRGQPCW

SEQ ID NO: 1817 - protein, 10 aa, Fusarium oxysporum
  REGION 1..10: note = Amino acid sequence of SEQ ID NO:857
WCLWRGQPCW

SEQ ID NO: 1818 - protein, 10 aa, Fusarium oxysporum
  REGION 1..10: note = Amino acid sequence of SEQ ID NO:858
WCTWRGQPCW

SEQ ID NO: 1819 - protein, 10 aa, Fusarium oxysporum
  REGION 1..10: note = Amino acid sequence of SEQ ID NO:859
WCMWRGQPCW

SEQ ID NO: 1820 - protein, 10 aa, Fusarium oxysporum
  REGION 1..10: note = Amino acid sequence of SEQ ID NO:860
WCLWRGQPCW

SEQ ID NO: 1821 - protein, 10 aa, Fusarium oxysporum
  REGION 1..10: note = Amino acid sequence of SEQ ID NO:861
WCTWRGQPCW

SEQ ID NO: 1822 - protein, 10 aa, Fusarium oxysporum
  REGION 1..10: note = Amino acid sequence of SEQ ID NO:862
WCLWRGQPCW

SEQ ID NO: 1823 - protein, 10 aa, Fusarium oxysporum
  REGION 1..10: note = Amino acid sequence of SEQ ID NO:863
WCTWRGQPCW

SEQ ID NO: 1824 - protein, 10 aa, Fusarium oxysporum
  REGION 1..10: note = Amino acid sequence of SEQ ID NO:864
WCMWRGQPCW

SEQ ID NO: 1825 - protein, 10 aa, Fusarium oxysporum
  REGION 1..10: note = Amino acid sequence of SEQ ID NO:865
WCTWRGQPCW

SEQ ID NO: 1826 - protein, 10 aa, Fusarium oxysporum
  REGION 1..10: note = Amino acid sequence of SEQ ID NO:866
WCLWRGQPCW

SEQ ID NO: 1827 - protein, 10 aa, Fusarium oxysporum
  REGION 1..10: note = Amino acid sequence of SEQ ID NO:867
WCMWRGQPCW

SEQ ID NO: 1828 - protein, 10 aa, Fusarium proliferatum
  REGION 1..10: note = Amino acid sequence of SEQ ID NO:868
WCTWRGQPCW

SEQ ID NO: 1829 - protein, 10 aa, Fusarium proliferatum
  REGION 1..10: note = Amino acid sequence of SEQ ID NO:869
WCMWRGQPCW

SEQ ID NO: 1830 - protein, 10 aa, Coniochaeta pulveracea
  REGION 1..10: note = Amino acid sequence of SEQ ID NO:870
WCPHKGQPCW

SEQ ID NO: 1831 - protein, 10 aa, Coniochaeta pulveracea
  REGION 1..10: note = Amino acid sequence of SEQ ID NO:871
WCPHPGQPCW

SEQ ID NO: 1832 - protein, 10 aa, Verticillium nonalfalfae
  REGION 1..10: note = Amino acid sequence of SEQ ID NO:872
PCPRPGQGCW

SEQ ID NO: 1833 - protein, 10 aa, Verticillium dahliae
  REGION 1..10: note = Amino acid sequence of SEQ ID NO:873
PCPRPGQGCW

SEQ ID NO: 1834 - protein, 10 aa, Fusarium oxysporum
  REGION 1..10: note = Amino acid sequence of SEQ ID NO:874
  source 1..10: note = f. sp. narcissi
WCTWRGQPCW

SEQ ID NO: 1835 - protein, 10 aa, Fusarium oxysporum
  REGION 1..10: note = Amino acid sequence of SEQ ID NO:875
  source 1..10: note = f. sp. narcissi
WCMWRGQPCW

SEQ ID NO: 1836 - protein, 10 aa, Fusarium oxysporum
  REGION 1..10: note = Amino acid sequence of SEQ ID NO:876
  source 1..10: note = f. sp. narcissi
WCLWRGQPCW

SEQ ID NO: 1837 - protein, 10 aa, Pochonia chlamydosporia
  REGION 1..10: note = Amino acid sequence of SEQ ID NO:877
  source 1..10: note = 123
WCWRPGQPCW

SEQ ID NO: 1838 - protein, 10 aa, Pochonia chlamydosporia
  REGION 1..10: note = Amino acid sequence of SEQ ID NO:878
  source 1..10: note = 123
WCWRPGQSCW

SEQ ID NO: 1839 - protein, 10 aa, Fusarium fujikuroi
  REGION 1..10: note = Amino acid sequence of SEQ ID NO:879
WCTWRGQPCW

SEQ ID NO: 1840 - protein, 10 aa, Fusarium fujikuroi
  REGION 1..10: note = Amino acid sequence of SEQ ID NO:880
WCMWRGQPCW

SEQ ID NO: 1841 - protein, 10 aa, Fusarium fujikuroi
  REGION 1..10: note = Amino acid sequence of SEQ ID NO:881
WCMWRGQPCW

SEQ ID NO: 1842 - protein, 10 aa, Fusarium fujikuroi
  REGION 1..10: note = Amino acid sequence of SEQ ID NO:882
WCTWRGQPCW

SEQ ID NO: 1843 - protein, 10 aa, Fusarium fujikuroi
  REGION 1..10: note = Amino acid sequence of SEQ ID NO:883
WCTWRGQPCW

SEQ ID NO: 1844 - protein, 10 aa, Fusarium fujikuroi
  REGION 1..10: note = Amino acid sequence of SEQ ID NO:884
WCMWRGQPCW

SEQ ID NO: 1845 - protein, 10 aa, Fusarium fujikuroi
  REGION 1..10: note = Amino acid sequence of SEQ ID NO:885
WCMWRGQPCW

SEQ ID NO: 1846 - protein, 10 aa, Fusarium fujikuroi
  REGION 1..10: note = Amino acid sequence of SEQ ID NO:886
WCTWRGQPCW

SEQ ID NO: 1847 - protein, 10 aa, Fusarium fujikuroi
  REGION 1..10: note = Amino acid sequence of SEQ ID NO:887
WCTWRGQPCW

SEQ ID NO: 1848 - protein, 10 aa, Fusarium fujikuroi
  REGION 1..10: note = Amino acid sequence of SEQ ID NO:888
WCMWRGQPCW

SEQ ID NO: 1849 - protein, 10 aa, Fusarium fujikuroi
  REGION 1..10: note = Amino acid sequence of SEQ ID NO:889
WCMWRGQPCW

SEQ ID NO: 1850 - protein, 10 aa, Fusarium fujikuroi
  REGION 1..10: note = Amino acid sequence of SEQ ID NO:890
WCTWRGQPCW

SEQ ID NO: 1851 - protein, 10 aa, Fusarium oxysporum
  REGION 1..10: note = Amino acid sequence of SEQ ID NO:891
WCTWRGQPCW

SEQ ID NO: 1852 - protein, 10 aa, Fusarium oxysporum
  REGION 1..10: note = Amino acid sequence of SEQ ID NO:892
WCLWRGQPCW

SEQ ID NO: 1853 - protein, 10 aa, Fusarium oxysporum
  REGION 1..10: note = Amino acid sequence of SEQ ID NO:893
WCMWRGQPCW

SEQ ID NO: 1854 - protein, 13 aa, Lachancea sp.
  REGION 1..13: note = Amino acid sequence of SEQ ID NO:894
  source 1..13: note = CBS 6924
WRWLRLDRGQPMY

SEQ ID NO: 1855 - protein, 11 aa, Lachancea sp.
  REGION 1..11: note = Amino acid sequence of SEQ ID NO:895
  source 1..11: note = CBS 6924
WLRLDRGQPMY

SEQ ID NO: 1856 - protein, 13 aa, Lachancea meyersii
  REGION 1..13: note = Amino acid sequence of SEQ ID NO:896
  source 1..13: note = CBS 8951
WHWLRLDRGQPMY

SEQ ID NO: 1857 - protein, 13 aa, Lachancea meyersii
  REGION 1..13: note = Amino acid sequence of SEQ ID NO:897
  source 1..13: note = CBS 8951
WHWLKLDRGQPMY

SEQ ID NO: 1858 - protein, 11 aa, Lachancea meyersii
  REGION 1..11: note = Amino acid sequence of SEQ ID NO:898
  source 1..11: note = CBS 8951
WHWLKLDRGQP

SEQ ID NO: 1859 - protein, 11 aa, Lachancea meyersii
  REGION 1..11: note = Amino acid sequence of SEQ ID NO:899
  source 1..11: note = CBS 8951
WHWLRLDRGQP

SEQ ID NO: 1860 - protein, 13 aa, Lachancea dasiensis
  REGION 1..13: note = Amino acid sequence of SEQ ID NO:900
  source 1..13: note = CBS 10888
WKWLRLGRGQPMY

SEQ ID NO: 1861 - protein, 11 aa, Lachancea dasiensis
  REGION 1..11: note = Amino acid sequence of SEQ ID NO:901
  source 1..11: note = CBS 10888
WKWLRLGRGQP

SEQ ID NO: 1862 - protein, 13 aa, Lachancea dasiensis
  REGION 1..13: note = Amino acid sequence of SEQ ID NO:902
  source 1..13: note = CBS 10888
WSWLRLGRGQPMY

SEQ ID NO: 1863 - protein, 11 aa, Lachancea dasiensis
  REGION 1..11: note = Amino acid sequence of SEQ ID NO:903
  source 1..11: note = CBS 10888
WSWLRLGRGQP

SEQ ID NO: 1864 - protein, 13 aa, Lachancea dasiensis
  REGION 1..13: note = Amino acid sequence of SEQ ID NO:904
  source 1..13: note = CBS 10888
WRWLRLGRGQPMY

SEQ ID NO: 1865 - protein, 11 aa, Lachancea dasiensis
  REGION 1..11: note = Amino acid sequence of SEQ ID NO:905
  source 1..11: note = CBS 10888
WRWLRLGRGQP

SEQ ID NO: 1866 - protein, 13 aa, Lachancea dasiensis
  REGION 1..13: note = Amino acid sequence of SEQ ID NO:906
  source 1..13: note = CBS 10888
WQWLRLGRGQPMY

SEQ ID NO: 1867 - protein, 11 aa, Lachancea dasiensis
  REGION 1..11: note = Amino acid sequence of SEQ ID NO:907
  source 1..11: note = CBS 10888
WQWLRLGRGQP

SEQ ID NO: 1868 - protein, 13 aa, Lachancea dasiensis
  REGION 1..13: note = Amino acid sequence of SEQ ID NO:908
  source 1..13: note = CBS 10888
WRWLRLDRGQPMY

SEQ ID NO: 1869 - protein, 11 aa, Lachancea dasiensis
  REGION 1..11: note = Amino acid sequence of SEQ ID NO:909
  source 1..11: note = CBS 10888
WRWLRLDRGQP

SEQ ID NO: 1870 - protein, 11 aa, Lachancea dasiensis
  REGION 1..11: note = Amino acid sequence of SEQ ID NO:910
  source 1..11: note = CBS 10888
WLRLGRGQPMY

SEQ ID NO: 1871 - protein, 11 aa, Lachancea dasiensis
  REGION 1..11: note = Amino acid sequence of SEQ ID NO:911
  source 1..11: note = CBS 10888
WLRLDRGQPMY

SEQ ID NO: 1872 - protein, 13 aa, Lachancea dasiensis
  REGION 1..13: note = Amino acid sequence of SEQ ID NO:912
  source 1..13: note = CBS 10888
WTWLKLDRGQPMY

SEQ ID NO: 1873 - protein, 11 aa, Lachancea nothofagi
  REGION 1..11: note = Amino acid sequence of SEQ ID NO:913
  source 1..11: note = CBS 11611
WTWLKLDRGQP

SEQ ID NO: 1874 - protein, 11 aa, Lachancea nothofagi
  REGION 1..11: note = Amino acid sequence of SEQ ID NO:914
  source 1..11: note = CBS 11611
WRWLRLDRGQP

SEQ ID NO: 1875 - protein, 13 aa, Lachancea nothofagi
  REGION 1..13: note = Amino acid sequence of SEQ ID NO:915
  source 1..13: note = CBS 11611
WRWLRLDRGQPMY

SEQ ID NO: 1876 - protein, 13 aa, Lachancea nothofagi
  REGION 1..13: note = Amino acid sequence of SEQ ID NO:916
  source 1..13: note = CBS 11611
WSWLRLDRGQPMY

SEQ ID NO: 1877 - protein, 11 aa, Lachancea nothofagi
  REGION 1..11: note = Amino acid sequence of SEQ ID NO:917
  source 1..11: note = CBS 11611
WSWLRLDRGQP

SEQ ID NO: 1878 - protein, 11 aa, Lachancea nothofagi
  REGION 1..11: note = Amino acid sequence of SEQ ID NO:918
  source 1..11: note = CBS 11611
WLKLDRGQPMY

SEQ ID NO: 1879 - protein, 11 aa, Lachancea nothofagi
  REGION 1..11: note = Amino acid sequence of SEQ ID NO:919
  source 1..11: note = CBS 11611
WLRLDRGQPMY

SEQ ID NO: 1880 - protein, 10 aa, Fusarium fujikuroi
  REGION 1..10: note = Amino acid sequence of SEQ ID NO:920
WCMWRGQPCW

SEQ ID NO: 1881 - protein, 10 aa, Fusarium fujikuroi
  REGION 1..10: note = Amino acid sequence of SEQ ID NO:921
WCTWRGQPCW

SEQ ID NO: 1882 - protein, 10 aa, Fusarium fujikuroi
  REGION 1..10: note = Amino acid sequence of SEQ ID NO:922
WCMWRGQPCW

SEQ ID NO: 1883 - protein, 10 aa, Fusarium fujikuroi
  REGION 1..10: note = Amino acid sequence of SEQ ID NO:923
WCTWRGQPCW

SEQ ID NO: 1884 - protein, 13 aa, Lachancea fermentati
  REGION 1..13: note = Amino acid sequence of SEQ ID NO:924
WHWLRLGKGQPLY

SEQ ID NO: 1885 - protein, 13 aa, Lachancea fermentati
  REGION 1..13: note = Amino acid sequence of SEQ ID NO:925
WHWLRLSSGQPLY

SEQ ID NO: 1886 - protein, 13 aa, Kazachstania saulgeensis
  REGION 1..13: note = Amino acid sequence of SEQ ID NO:926
WHWLELDWGQPLY

SEQ ID NO: 1887 - protein, 13 aa, Kazachstania saulgeensis
  REGION 1..13: note = Amino acid sequence of SEQ ID NO:927
WHWLELDWGQPLY

SEQ ID NO: 1888 - protein, 13 aa, Saccharomycodes ludwigii
  REGION 1..13: note = Amino acid sequence of SEQ ID NO:928
WQWLSFQWGEPMY

SEQ ID NO: 1889 - protein, 13 aa, Saccharomycodes ludwigii
  REGION 1..13: note = Amino acid sequence of SEQ ID NO:929
WQWLTFQWGEPMY

SEQ ID NO: 1890 - protein, 10 aa, Chlorociboria aeruginascens
  REGION 1..10: note = Amino acid sequence of SEQ ID NO:930
KCGRPGQGCK

SEQ ID NO: 1891 - protein, 9 aa, Botryotinia calthae
  REGION 1..9: note = Amino acid sequence of SEQ ID NO:931
WCGRPGQPC

SEQ ID NO: 1892 - protein, 10 aa, Botryotinia calthae
  REGION 1..10: note = Amino acid sequence of SEQ ID NO:932
WCGRPGQPCK

SEQ ID NO: 1893 - protein, 10 aa, Botrytis tulipae
  REGION 1..10: note = Amino acid sequence of SEQ ID NO:933
WCGRPGQPCK

SEQ ID NO: 1894 - protein, 9 aa, Botrytis tulipae
  REGION 1..9: note = Amino acid sequence of SEQ ID NO:934
WCGRPGQPC

SEQ ID NO: 1895 - protein, 10 aa, Botrytis paeoniae
  REGION 1..10: note = Amino acid sequence of SEQ ID NO:935
WCGRPGQPCK

SEQ ID NO: 1896 - protein, 9 aa, Botrytis paeoniae
  REGION 1..9: note = Amino acid sequence of SEQ ID NO:936
WCGRPGQPC

SEQ ID NO: 1897 - protein, 9 aa, Botrytis hyacinthi
  REGION 1..9: note = Amino acid sequence of SEQ ID NO:937
WCGRPGQPC

SEQ ID NO: 1898 - protein, 10 aa, Botrytis hyacinthi
  REGION 1..10: note = Amino acid sequence of SEQ ID NO:938
WCGRPGQPCK

SEQ ID NO: 1899 - protein, 10 aa, Botryotinia convoluta
  REGION 1..10: note = Amino acid sequence of SEQ ID NO:939
WCGRPGQPCK

SEQ ID NO: 1900 - protein, 9 aa, Botryotinia convoluta
  REGION 1..9: note = Amino acid sequence of SEQ ID NO:940
WCGRPGQPC

SEQ ID NO: 1901 - protein, 10 aa, Botryotinia narcissicola
  REGION 1..10: note = Amino acid sequence of SEQ ID NO:941
WCGRPGQPCK

SEQ ID NO: 1902 - protein, 9 aa, Botryotinia narcissicola
  REGION 1..9: note = Amino acid sequence of SEQ ID NO:942
WCGRPGQPC

SEQ ID NO: 1903 - protein, 10 aa, Botrytis elliptica
  REGION 1..10: note = Amino acid sequence of SEQ ID NO:943
WCGRPGQPCK

SEQ ID NO: 1904 - protein, 9 aa, Botrytis elliptica
  REGION 1..9: note = Amino acid sequence of SEQ ID NO:944
WCGRPGQPC

SEQ ID NO: 1905 - protein, 10 aa, Botrytis porri
  REGION 1..10: note = Amino acid sequence of SEQ ID NO:945
WCGRPGQPCK

SEQ ID NO: 1906 - protein, 9 aa, Botrytis porri
  REGION 1..9: note = Amino acid sequence of SEQ ID NO:946
WCGRPGQPC

SEQ ID NO: 1907 - protein, 9 aa, Botrytis galanthina
  REGION 1..9: note = Amino acid sequence of SEQ ID NO:947
WCGRPGQPC

SEQ ID NO: 1908 - protein, 10 aa, Botrytis galanthina
  REGION 1..10: note = Amino acid sequence of SEQ ID NO:948
WCGRPGQPCK

SEQ ID NO: 1909 - protein, 10 aa, Pyricularia grisea
  REGION 1..10: note = Amino acid sequence of SEQ ID NO:949
WCPRRGQPCW

SEQ ID NO: 1910 - protein, 10 aa, Pyricularia sp.
  REGION 1..10: note = Amino acid sequence of SEQ ID NO:950
  source 1..10: note = CBS 133598
WCPRRGQPCW

SEQ ID NO: 1911 - protein, 10 aa, Pyricularia pennisetigena
  REGION 1..10: note = Amino acid sequence of SEQ ID NO:951
WCPRRGQPCW

SEQ ID NO: 1912 - protein, 10 aa, Fusarium oxysporum
  REGION 1..10: note = Amino acid sequence of SEQ ID NO:952
  source 1..10: note = f. sp. cubense
WCLWRGQPCW

SEQ ID NO: 1913 - protein, 10 aa, Fusarium oxysporum
  REGION 1..10: note = Amino acid sequence of SEQ ID NO:953
  source 1..10: note = f. sp. cubense
WCTWRGQPCW

SEQ ID NO: 1914 - protein, 10 aa, Fusarium oxysporum
  REGION 1..10: note = Amino acid sequence of SEQ ID NO:954
  source 1..10: note = f. sp. cubense
WCMWRGQPCW

SEQ ID NO: 1915 - protein, 10 aa, Metarhizium rileyi
  REGION 1..10: note = Amino acid sequence of SEQ ID NO:955
WCWRPGQPCW

SEQ ID NO: 1916 - protein, 10 aa, Fusarium oxysporum
  REGION 1..10: note = Amino acid sequence of SEQ ID NO:956
  source 1..10: note = f. sp. cubense
WCMWRGQPCW

SEQ ID NO: 1917 - protein, 10 aa, Fusarium oxysporum
  REGION 1..10: note = Amino acid sequence of SEQ ID NO:957
  source 1..10: note = f. sp. cubense
WCLWRGQPCW

SEQ ID NO: 1918 - protein, 10 aa, Fusarium oxysporum
  REGION 1..10: note = Amino acid sequence of SEQ ID NO:958
  source 1..10: note = f. sp. cubense
WCTWRGQPCW

SEQ ID NO: 1919 - protein, 10 aa, Fusarium graminearum
  REGION 1..10: note = Amino acid sequence of SEQ ID NO:959
WCTWKGQPCW

SEQ ID NO: 1920 - protein, 10 aa, Fusarium graminearum
  REGION 1..10: note = Amino acid sequence of SEQ ID NO:960
WCWWKGQPCW

SEQ ID NO: 1921 - protein, 13 aa, synthetic construct
  REGION 1..13: note = Motif
  VARIANT 2: note = X = T, E, K, Q, S, R, G or H
  VARIANT 4: note = X = G, I, V or L
  VARIANT 5: note = X = A, T, K, E, N, S, R or Q
  VARIANT 6: note = X = I, F or L
  VARIANT 7: note = X = E, A, Y, Q, M, F, S, G, D, R or K
  VARIANT 8: note = X = N, T, L, A, Y, I, W, V, M, K, R or P
  VARIANT 10: note = X = A, E, or Q
  VARIANT 12: note = X = F, L, I or M
WXWXXXXXGXPXY

SEQ ID NO: 1922 - protein, 13 aa, synthetic construct
  REGION 1..13: note = Motif
  VARIANT 5: note = X = A, T, K, E, N, S, R or Q
  VARIANT 7: note = X = E, A, Y, Q, M, F, S, G, D, R or K
  VARIANT 8: note = X = N, T, L, A, Y, I, W, V, M, K, R or P
WHWLXLXXGQPMY

SEQ ID NO: 1923 - protein, 13 aa, synthetic construct
  REGION 1..13: note = Motif
  VARIANT 5: note = X = A, T, K, E, N, S, R or Q
  VARIANT 7: note = X = E, A, Y, Q, M, F, S, G, D, R or K
  VARIANT 8: note = X = N, T, L, A, Y, I, W, V, M, K, R or P
  VARIANT 10: note = X = A, E, or Q
  VARIANT 12: note = X = F, L, I or M
WHWLXLXXGXPXY

SEQ ID NO: 1924 - protein, 13 aa, synthetic construct
  REGION 1..13: note = Motif
  VARIANT 2: note = X = T, E, K, Q, S, R, G or H
  VARIANT 4: note = X = G, I, V or L
  VARIANT 5: note = X = A, T, K, E, N, S, R or Q
  VARIANT 7: note = X = E, A, Y, Q, M, F, S, G, D, R or K
WXWXXLXPGQPMY

SEQ ID NO: 1925 - protein, 13 aa, synthetic construct
  REGION 1..13: note = Motif
  VARIANT 7: note = X = E, A, Y, Q, M, F, S, G, D, R or K
  VARIANT 8: note = X = N, T, L, A, Y, I, W, V, M, K, R or P
  VARIANT 10: note = X = A, E, or Q
  VARIANT 12: note = X = F, L, I or M
WHWLRLXXGXPXY

SEQ ID NO: 1926 - protein, 13 aa, synthetic construct
  REGION 1..13: note = Motif
  VARIANT 7: note = X = E, A, Y, Q, M, F, S, G, D, R or K
  VARIANT 8: note = X = N, T, L, A, Y, I, W, V, M, K, R or P
  VARIANT 10: note = X = A, E, or Q
  VARIANT 12: note = X = F, L, I or M
WHWLQLXXGXPXY

SEQ ID NO: 1927 - protein, 13 aa, synthetic construct
  REGION 1..13: note = Motif
  VARIANT 8: note = X = N, T, L, A, Y, I, W, V, M, K, R or P
  VARIANT 10: note = X = A, E, or Q
  VARIANT 12: note = X = F, L, I or M
WHWLRLKXGXPXY

SEQ ID NO: 1928 - protein, 13 aa, synthetic construct
  REGION 1..13: note = Motif
  VARIANT 8: note = X = N, T, L, A, Y, I, W, V, M, K, R or P
  VARIANT 10: note = X = A, E, or Q
  VARIANT 12: note = X = F, L, I or M
WHWLRLRXGXPXY

SEQ ID NO: 1929 - protein, 13 aa, synthetic construct
  REGION 1..13: note = Motif
  VARIANT 8: note = X = N, T, L, A, Y, I, W, V, M, K, R or P
  VARIANT 10: note = X = A, E, or Q
  VARIANT 12: note = X = F, L, I or M
WHWLQLKXGXPXY

SEQ ID NO: 1930 - protein, 13 aa, synthetic construct
  REGION 1..13: note = Motif
  VARIANT 8: note = X = N, T, L, A, Y, I, W, V, M, K, R or P
  VARIANT 10: note = X = A, E, or Q
  VARIANT 12: note = X = F, L, I or M
WHWLQLRXGXPXY

SEQ ID NO: 1931 - protein, 13 aa, synthetic construct
  REGION 1..13: note = Motif
  VARIANT 7: note = X = E, A, Y, Q, M, F, S, G, D, R or K
  VARIANT 10: note = X = A, E, or Q
  VARIANT 12: note = X = F, L, I or M
WHWLRLXPGXPXY

SEQ ID NO: 1932 - protein, 13 aa, synthetic construct
  REGION 1..13: note = Motif
  VARIANT 10: note = X = A, E, or Q
  VARIANT 12: note = X = F, L, I or M
WHWLRLKPGXPXY

SEQ ID NO: 1933 - protein, 13 aa, synthetic construct
  REGION 1..13: note = Motif
  VARIANT 10: note = X = A, E, or Q
  VARIANT 12: note = X = F, L, I or M
WHWLRLRPGXPXY

SEQ ID NO: 1934 - protein, 13 aa, synthetic construct
  REGION 1..13: note = Motif
  VARIANT 7: note = X = E, A, Y, Q, M, F, S, G, D, R or K
  VARIANT 10: note = X = A, E, or Q
  VARIANT 12: note = X = F, L, I or M
WHWLQLXPGXPXY

SEQ ID NO: 1935 - protein, 13 aa, synthetic construct
  REGION 1..13: note = Motif
  VARIANT 10: note = X = A, E, or Q
  VARIANT 12: note = X = F, L, I or M
WHWLQLKPGXPXY

SEQ ID NO: 1936 - protein, 13 aa, synthetic construct
  REGION 1..13: note = Motif
  VARIANT 10: note = X = A, E, or Q
  VARIANT 12: note = X = F, L, I or M
WHWLQLRPGXPXY

SEQ ID NO: 1937 - protein, 13 aa, synthetic construct
  REGION 1..13: note = Motif
  VARIANT 7: note = X = E, A, Y, Q, M, F, S, G, D, R or K
  VARIANT 8: note = X = N, T, L, A, Y, I, W, V, M, K, R or P
  VARIANT 12: note = X = F, L, I or M
WHWLRLXXGQPXY

SEQ ID NO: 1938 - protein, 13 aa, synthetic construct
  REGION 1..13: note = Motif
  VARIANT 7: note = X = E, A, Y, Q, M, F, S, G, D, R or K
  VARIANT 12: note = X = F, L, I or M
WHWLRLXPGQPXY

SEQ ID NO: 1939 - protein, 13 aa, synthetic construct
  REGION 1..13: note = Motif
  VARIANT 7: note = X = E, A, Y, Q, M, F, S, G, D, R or K
  VARIANT 8: note = X = N, T, L, A, Y, I, W, V, M, K, R or P
  VARIANT 12: note = X = F, L, I or M
WHWLQLXXGQPXY

SEQ ID NO: 1940 - protein, 13 aa, synthetic construct
  REGION 1..13: note = Motif
  VARIANT 7: note = X = E, A, Y, Q, M, F, S, G, D, R or K
  VARIANT 12: note = X = F, L, I or M
WHWLQLXPGQPXY

SEQ ID NO: 1941 - protein, 13 aa, synthetic construct
  REGION 1..13: note = Motif
  VARIANT 7: note = X = E, A, Y, Q, M, F, S, G, D, R or K
  VARIANT 8: note = X = N, T, L, A, Y, I, W, V, M, K, R or P
  VARIANT 10: note = X = A, E, or Q
WHWLRLXXGXPMY

SEQ ID NO: 1942 - protein, 13 aa, synthetic construct
  REGION 1..13: note = Motif
  VARIANT 7: note = X = E, A, Y, Q, M, F, S, G, D, R or K
  VARIANT 8: note = X = N, T, L, A, Y, I, W, V, M, K, R or P
WHWLRLXXGQPMY

SEQ ID NO: 1943 - protein, 13 aa, synthetic construct
  REGION 1..13: note = Motif
  VARIANT 7: note = X = E, A, Y, Q, M, F, S, G, D, R or K
  VARIANT 10: note = X = A, E, or Q
WHWLRLXPGXPMY

SEQ ID NO: 1944 - protein, 13 aa, synthetic construct
  REGION 1..13: note = Motif
  VARIANT 7: note = X = E, A, Y, Q, M, F, S, G, D, R or K
  VARIANT 8: note = X = N, T, L, A, Y, I, W, V, M, K, R or P
  VARIANT 10: note = X = A, E, or Q
WHWLQLXXGXPMY

SEQ ID NO: 1945 - protein, 13 aa, synthetic construct
  REGION 1..13: note = Motif
  VARIANT 7: note = X = E, A, Y, Q, M, F, S, G, D, R or K
  VARIANT 8: note = X = N, T, L, A, Y, I, W, V, M, K, R or P
WHWLQLXXGQPMY

SEQ ID NO: 1946 - protein, 13 aa, synthetic construct
  REGION 1..13: note = Motif
  VARIANT 7: note = X = E, A, Y, Q, M, F, S, G, D, R or K
  VARIANT 10: note = X = A, E, or Q
WHWLQLXPGXPMY

SEQ ID NO: 1947 - protein, 13 aa, synthetic construct
  REGION 1..13: note = Motif
  VARIANT 2: note = X = T, E, K, Q, S, R, G or H
  VARIANT 4: note = X = G, I, V or L
  VARIANT 5: note = X = A, T, K, E, N, S, R or Q
  VARIANT 6: note = X = I, F or L
  VARIANT 10: note = X = A, E, or Q
  VARIANT 12: note = X = F, L, I or M
WXWXXXRPGXPXY

SEQ ID NO: 1948 - protein, 13 aa, synthetic construct
  REGION 1..13: note = Motif
  VARIANT 2: note = X = T, E, K, Q, S, R, G or H
  VARIANT 4: note = X = G, I, V or L
  VARIANT 5: note = X = A, T, K, E, N, S, R or Q
  VARIANT 6: note = X = I, F or L
  VARIANT 12: note = X = F, L, I or M
WXWXXXRPGQPXY

SEQ ID NO: 1949 - protein, 13 aa, synthetic construct
  REGION 1..13: note = Motif
  VARIANT 2: note = X = T, E, K, Q, S, R, G or H
  VARIANT 4: note = X = G, I, V or L
  VARIANT 5: note = X = A, T, K, E, N, S, R or Q
  VARIANT 6: note = X = I, F or L
  VARIANT 8: note = X = N, T, L, A, Y, I, W, V, M, K, R or P
  VARIANT 10: note = X = A, E, or Q
WXWXXXRXGXPMY

SEQ ID NO: 1950 - protein, 13 aa, synthetic construct
  REGION 1..13: note = Motif
  VARIANT 2: note = X = T, E, K, Q, S, R, G or H
  VARIANT 4: note = X = G, I, V or L
  VARIANT 5: note = X = A, T, K, E, N, S, R or Q
  VARIANT 6: note = X = I, F or L
  VARIANT 8: note = X = N, T, L, A, Y, I, W, V, M, K, R or P
WXWXXXRXGQPMY

SEQ ID NO: 1951 - protein, 13 aa, synthetic construct
  REGION 1..13: note = Motif
  VARIANT 2: note = X = T, E, K, Q, S, R, G or H
  VARIANT 4: note = X = G, I, V or L
  VARIANT 5: note = X = A, T, K, E, N, S, R or Q
  VARIANT 6: note = X = I, F or L
  VARIANT 10: note = X = A, E, or Q
WXWXXXRPGXPMY

SEQ ID NO: 1952 - protein, 13 aa, synthetic construct
  REGION 1..13: note = Motif
  VARIANT 2: note = X = T, E, K, Q, S, R, G or H
  VARIANT 4: note = X = G, I, V or L
  VARIANT 5: note = X = A, T, K, E, N, S, R or Q
  VARIANT 6: note = X = I, F or L
  VARIANT 10: note = X = A, E, or Q
  VARIANT 12: note = X = F, L, I or M
WXWXXXKPGXPXY

SEQ ID NO: 1953 - protein, 13 aa, synthetic construct
  REGION 1..13: note = Motif
  VARIANT 2: note = X = T, E, K, Q, S, R, G or H
  VARIANT 4: note = X = G, I, V or L
  VARIANT 5: note = X = A, T, K, E, N, S, R or Q
  VARIANT 6: note = X = I, F or L
  VARIANT 12: note = X = F, L, I or M
WXWXXXKPGQPXY

SEQ ID NO: 1954 - protein, 13 aa, synthetic construct
  REGION 1..13: note = Motif
  VARIANT 2: note = X = T, E, K, Q, S, R, G or H
  VARIANT 4: note = X = G, I, V or L
  VARIANT 5: note = X = A, T, K, E, N, S, R or Q
  VARIANT 6: note = X = I, F or L
  VARIANT 8: note = X = N, T, L, A, Y, I, W, V, M, K, R or P
  VARIANT 10: note = X = A, E, or Q
WXWXXXKXGXPMY

SEQ ID NO: 1955 - protein, 13 aa, synthetic construct
  REGION 1..13: note = Motif
  VARIANT 2: note = X = T, E, K, Q, S, R, G or H
  VARIANT 4: note = X = G, I, V or L
  VARIANT 5: note = X = A, T, K, E, N, S, R or Q
  VARIANT 6: note = X = I, F or L
  VARIANT 8: note = X = N, T, L, A, Y, I, W, V, M, K, R or P
WXWXXXKXGQPMY

SEQ ID NO: 1956 - protein, 13 aa, synthetic construct
  REGION 1..13: note = Motif
  VARIANT 2: note = X = T, E, K, Q, S, R, G or H
  VARIANT 4: note = X = G, I, V or L
  VARIANT 5: note = X = A, T, K, E, N, S, R or Q
  VARIANT 6: note = X = I, F or L
  VARIANT 10: note = X = A, E, or Q
WXWXXXKPGXPMY

SEQ ID NO: 1957 - protein, 20 aa, synthetic construct
  REGION 1..20: note = Peptide105+Peptide105
WCTWKGQPCWWCTWKGQPCW

SEQ ID NO: 1958 - protein, 19 aa, synthetic construct
  REGION 1..19: note = Peptide105+Peptide106
WCTWKGQPCWWCGRPGQPC

SEQ ID NO: 1959 - protein, 23 aa, synthetic construct
  REGION 1..23: note = Peptide105+Peptide107
WCTWKGQPCWWHWLQLKPGQPMY

SEQ ID NO: 1960 - protein, 20 aa, synthetic construct
  REGION 1..20: note = Peptide105+Peptide108
WCTWKGQPCWTWQKCWWPGC

SEQ ID NO: 1961 - protein, 20 aa, synthetic construct
  REGION 1..20: note = Peptide105+Peptide109
WCTWKGQPCWPKWTWQGCCW

SEQ ID NO: 1962 - protein, 20 aa, synthetic construct
  REGION 1..20: note = Peptide105+Peptide110
WCTWKGQPCWQTWWPGCKWC

SEQ ID NO: 1963 - protein, 20 aa, synthetic construct
  REGION 1..20: note = Peptide105+Peptide111
WCTWKGQPCWTQWCWWGKCP

SEQ ID NO: 1964 - protein, 19 aa, synthetic construct
  REGION 1..19: note = Peptide105+Peptide112
WCTWKGQPCWCPWCQGGRP

SEQ ID NO: 1965 - protein, 19 aa, synthetic construct
  REGION 1..19: note = Peptide105+Peptide113
WCTWKGQPCWPGPCWRGCQ

SEQ ID NO: 1966 - protein, 19 aa, synthetic construct
  REGION 1..19: note = Peptide105+Peptide114
WCTWKGQPCWGWQCRPPCG

SEQ ID NO: 1967 - protein, 19 aa, synthetic construct
  REGION 1..19: note = Peptide105+Peptide115
WCTWKGQPCWCGQRGPPCW

SEQ ID NO: 1968 - protein, 23 aa, synthetic construct
  REGION 1..23: note = Peptide105+Peptide116
WCTWKGQPCWWKMGQYHQLPPLW

SEQ ID NO: 1969 - protein, 23 aa, synthetic construct
  REGION 1..23: note = Peptide105+Peptide117
WCTWKGQPCWMYGKPHLWQLQWP

SEQ ID NO: 1970 - protein, 23 aa, synthetic construct
  REGION 1..23: note = Peptide105+Peptide118
WCTWKGQPCWQMWPGPWHKQYLL

SEQ ID NO: 1971 - protein, 23 aa, synthetic construct
  REGION 1..23: note = Peptide105+Peptide119
WCTWKGQPCWPGQMKWPHWLLYQ

SEQ ID NO: 1972 - protein, 19 aa, synthetic construct
  REGION 1..19: note = Peptide106+Peptide105
WCGRPGQPCWCTWKGQPCW

SEQ ID NO: 1973 - protein, 18 aa, synthetic construct
  REGION 1..18: note = Peptide106+Peptide106
WCGRPGQPCWCGRPGQPC

SEQ ID NO: 1974 - protein, 22 aa, synthetic construct
  REGION 1..22: note = Peptide106+Peptide107
WCGRPGQPCWHWLQLKPGQPMY

SEQ ID NO: 1975 - protein, 19 aa, synthetic construct
  REGION 1..19: note = Peptide106+Peptide108
WCGRPGQPCTWQKCWWPGC

SEQ ID NO: 1976 - protein, 19 aa, synthetic construct
  REGION 1..19: note = Peptide106+Peptide109
WCGRPGQPCPKWTWQGCCW

SEQ ID NO: 1977 - protein, 19 aa, synthetic construct
  REGION 1..19: note = Peptide106+Peptide110
WCGRPGQPCQTWWPGCKWC

SEQ ID NO: 1978 - protein, 19 aa, synthetic construct
  REGION 1..19: note = Peptide106+Peptide111
WCGRPGQPCTQWCWWGKCP

SEQ ID NO: 1979 - protein, 18 aa, synthetic construct
  REGION 1..18: note = Peptide106+Peptide112
WCGRPGQPCCPWCQGGRP

SEQ ID NO: 1980 - protein, 18 aa, synthetic construct
  REGION 1..18: note = Peptide106+Peptide113
WCGRPGQPCPGPCWRGCQ

SEQ ID NO: 1981 - protein, 18 aa, synthetic construct
  REGION 1..18: note = Peptide106+Peptide114
WCGRPGQPCGWQCRPPCG

SEQ ID NO: 1982 - protein, 18 aa, synthetic construct
  REGION 1..18: note = Peptide106+Peptide115
WCGRPGQPCCGQRGPPCW

SEQ ID NO: 1983 - protein, 22 aa, synthetic construct
  REGION 1..22: note = Peptide106+Peptide116
WCGRPGQPCWKMGQYHQLPPLW

SEQ ID NO: 1984 - protein, 22 aa, synthetic construct
  REGION 1..22: note = Peptide106+Peptide117
WCGRPGQPCMYGKPHLWQLQWP

SEQ ID NO: 1985 - protein, 22 aa, synthetic construct
  REGION 1..22: note = Peptide106+Peptide118
WCGRPGQPCQMWPGPWHKQYLL

SEQ ID NO: 1986 - protein, 22 aa, synthetic construct
  REGION 1..22: note = Peptide106+Peptide119
WCGRPGQPCPGQMKWPHWLLYQ

SEQ ID NO: 1987 - protein, 23 aa, synthetic construct
  REGION 1..23: note = Peptide107+Peptide105
WHWLQLKPGQPMYWCTWKGQPCW

SEQ ID NO: 1988 - protein, 22 aa, synthetic construct
  REGION 1..22: note = Peptide107+Peptide106
WHWLQLKPGQPMYWCGRPGQPC

SEQ ID NO: 1989 - protein, 26 aa, synthetic construct
  REGION 1..26: note = Peptide107+Peptide107
WHWLQLKPGQPMYWHWLQLKPGQPMY

SEQ ID NO: 1990 - protein, 23 aa, synthetic construct
  REGION 1..23: note = Peptide107+Peptide108
WHWLQLKPGQPMYTWQKCWWPGC

SEQ ID NO: 1991 - protein, 23 aa, synthetic construct
  REGION 1..23: note = Peptide107+Peptide109
WHWLQLKPGQPMYPKWTWQGCCW

SEQ ID NO: 1992 - protein, 23 aa, synthetic construct
  REGION 1..23: note = Peptide107+Peptide110
WHWLQLKPGQPMYQTWWPGCKWC

SEQ ID NO: 1993 - protein, 23 aa, synthetic construct
  REGION 1..23: note = Peptide107+Peptide111
WHWLQLKPGQPMYTQWCWWGKCP

SEQ ID NO: 1994 - protein, 22 aa, synthetic construct
  REGION 1..22: note = Peptide107+Peptide112
WHWLQLKPGQPMYCPWCQGGRP

SEQ ID NO: 1995 - protein, 22 aa, synthetic construct
  REGION 1..22: note = Peptide107+Peptide113
WHWLQLKPGQPMYPGPCWRGCQ

SEQ ID NO: 1996 - protein, 22 aa, synthetic construct
  REGION 1..22: note = Peptide107+Peptide114
WHWLQLKPGQPMYGWQCRPPCG

SEQ ID NO: 1997 - protein, 22 aa, synthetic construct
  REGION 1..22: note = Peptide107+Peptide115
WHWLQLKPGQPMYCGQRGPPCW

SEQ ID NO: 1998 - protein, 26 aa, synthetic construct
  REGION 1..26: note = Peptide107+Peptide116
WHWLQLKPGQPMYWKMGQYHQLPPLW

SEQ ID NO: 1999 - protein, 26 aa, synthetic construct
  REGION 1..26: note = Peptide107+Peptide117
WHWLQLKPGQPMYMYGKPHLWQLQWP

SEQ ID NO: 2000 - protein, 26 aa, synthetic construct
  REGION 1..26: note = Peptide107+Peptide118
WHWLQLKPGQPMYQMWPGPWHKQYLL

SEQ ID NO: 2001 - protein, 26 aa, synthetic construct
  REGION 1..26: note = Peptide107+Peptide119
WHWLQLKPGQPMYPGQMKWPHWLLYQ

SEQ ID NO: 2002 - protein, 20 aa, synthetic construct
  REGION 1..20: note = Peptide108+Peptide105
TWQKCWWPGCWCTWKGQPCW

SEQ ID NO: 2003 - protein, 19 aa, synthetic construct
  REGION 1..19: note = Peptide108+Peptide106
TWQKCWWPGCWCGRPGQPC

SEQ ID NO: 2004 - protein, 23 aa, synthetic construct
  REGION 1..23: note = Peptide108+Peptide107
TWQKCWWPGCWHWLQLKPGQPMY

SEQ ID NO: 2005 - protein, 20 aa, synthetic construct
  REGION 1..20: note = Peptide108+Peptide108
TWQKCWWPGCTWQKCWWPGC

SEQ ID NO: 2006 - protein, 20 aa, synthetic construct
  REGION 1..20: note = Peptide108+Peptide109
TWQKCWWPGCPKWTWQGCCW

SEQ ID NO: 2007 - protein, 20 aa, synthetic construct
  REGION 1..20: note = Peptide108+Peptide110
TWQKCWWPGCQTWWPGCKWC

SEQ ID NO: 2008 - protein, 20 aa, synthetic construct
  REGION 1..20: note = Peptide108+Peptide111
TWQKCWWPGCTQWCWWGKCP

SEQ ID NO: 2009 - protein, 19 aa, synthetic construct
  REGION 1..19: note = Peptide108+Peptide112
TWQKCWWPGCCPWCQGGRP

SEQ ID NO: 2010 - protein, 19 aa, synthetic construct
  REGION 1..19: note = Peptide108+Peptide113
TWQKCWWPGCPGPCWRGCQ

SEQ ID NO: 2011 - protein, 19 aa, synthetic construct
  REGION 1..19: note = Peptide108+Peptide114
TWQKCWWPGCGWQCRPPCG

SEQ ID NO: 2012 - protein, 19 aa, synthetic construct
  REGION 1..19: note = Peptide108+Peptide115
TWQKCWWPGCCGQRGPPCW

SEQ ID NO: 2013 - protein, 23 aa, synthetic construct
  REGION 1..23: note = Peptide108+Peptide116
TWQKCWWPGCWKMGQYHQLPPLW

SEQ ID NO: 2014 - protein, 23 aa, synthetic construct
  REGION 1..23: note = Peptide108+Peptide117
TWQKCWWPGCMYGKPHLWQLQWP

SEQ ID NO: 2015 - protein, 23 aa, synthetic construct
  REGION 1..23: note = Peptide108+Peptide118
TWQKCWWPGCQMWPGPWHKQYLL

SEQ ID NO: 2016 - protein, 23 aa, synthetic construct
  REGION 1..23: note = Peptide108+Peptide119
TWQKCWWPGCPGQMKWPHWLLYQ

SEQ ID NO: 2017 - protein, 20 aa, synthetic construct
  REGION 1..20: note = Peptide109+Peptide105
PKWTWQGCCWWCTWKGQPCW

SEQ ID NO: 2018 - protein, 19 aa, synthetic construct
  REGION 1..19: note = Peptide109+Peptide106
PKWTWQGCCWWCGRPGQPC

SEQ ID NO: 2019 - protein, 23 aa, synthetic construct
  REGION 1..23: note = Peptide109+Peptide107
PKWTWQGCCWWHWLQLKPGQPMY

SEQ ID NO: 2020 - protein, 20 aa, synthetic construct
  REGION 1..20: note = Peptide109+Peptide108
PKWTWQGCCWTWQKCWWPGC

SEQ ID NO: 2021 - protein, 20 aa, synthetic construct
  REGION 1..20: note = Peptide109+Peptide109
PKWTWQGCCWPKWTWQGCCW

SEQ ID NO: 2022 - protein, 20 aa, synthetic construct
  REGION 1..20: note = Peptide109+Peptide110
PKWTWQGCCWQTWWPGCKWC

SEQ ID NO: 2023 - protein, 20 aa, synthetic construct
  REGION 1..20: note = Peptide109+Peptide111
PKWTWQGCCWTQWCWWGKCP

SEQ ID NO: 2024 - protein, 19 aa, synthetic construct
  REGION 1..19: note = Peptide109+Peptide112
PKWTWQGCCWCPWCQGGRP

SEQ ID NO: 2025 - protein, 19 aa, synthetic construct
  REGION 1..19: note = Peptide109+Peptide113
PKWTWQGCCWPGPCWRGCQ

SEQ ID NO: 2026 - protein, 19 aa, synthetic construct
  REGION 1..19: note = Peptide109+Peptide114
PKWTWQGCCWGWQCRPPCG

SEQ ID NO: 2027 - protein, 19 aa, synthetic construct
  REGION 1..19: note = Peptide109+Peptide115
PKWTWQGCCWCGQRGPPCW

SEQ ID NO: 2028 - protein, 23 aa, synthetic construct
  REGION 1..23: note = Peptide109+Peptide116
PKWTWQGCCWWKMGQYHQLPPLW

SEQ ID NO: 2029 - protein, 23 aa, synthetic construct
  REGION 1..23: note = Peptide109+Peptide117
PKWTWQGCCWMYGKPHLWQLQWP

SEQ ID NO: 2030 - protein, 23 aa, synthetic construct
  REGION 1..23: note = Peptide109+Peptide118
PKWTWQGCCWQMWPGPWHKQYLL

SEQ ID NO: 2031 - protein, 23 aa, synthetic construct
  REGION 1..23: note = Peptide109+Peptide119
PKWTWQGCCWPGQMKWPHWLLYQ

SEQ ID NO: 2032 - protein, 20 aa, synthetic construct
  REGION 1..20: note = Peptide110+Peptide105
QTWWPGCKWCWCTWKGQPCW

SEQ ID NO: 2033 - protein, 19 aa, synthetic construct
  REGION 1..19: note = Peptide110+Peptide106
QTWWPGCKWCWCGRPGQPC

SEQ ID NO: 2034 - protein, 23 aa, synthetic construct
  REGION 1..23: note = Peptide110+Peptide107
QTWWPGCKWCWHWLQLKPGQPMY

SEQ ID NO: 2035 - protein, 20 aa, synthetic construct
  REGION 1..20: note = Peptide110+Peptide108
QTWWPGCKWCTWQKCWWPGC

SEQ ID NO: 2036 - protein, 20 aa, synthetic construct
  REGION 1..20: note = Peptide110+Peptide109
QTWWPGCKWCPKWTWQGCCW

SEQ ID NO: 2037 - protein, 20 aa, synthetic construct
  REGION 1..20: note = Peptide110+Peptide110
QTWWPGCKWCQTWWPGCKWC

SEQ ID NO: 2038 - protein, 20 aa, synthetic construct
  REGION 1..20: note = Peptide110+Peptide111
QTWWPGCKWCTQWCWWGKCP

SEQ ID NO: 2039 - protein, 19 aa, synthetic construct
  REGION 1..19: note = Peptide110+Peptide112
QTWWPGCKWCCPWCQGGRP

SEQ ID NO: 2040 - protein, 19 aa, synthetic construct
  REGION 1..19: note = Peptide110+Peptide113
QTWWPGCKWCPGPCWRGCQ

SEQ ID NO: 2041 - protein, 19 aa, synthetic construct
  REGION 1..19: note = Peptide110+Peptide114
QTWWPGCKWCGWQCRPPCG

SEQ ID NO: 2042 - protein, 19 aa, synthetic construct
  REGION 1..19: note = Peptide110+Peptide115
QTWWPGCKWCCGQRGPPCW

SEQ ID NO: 2043 - protein, 23 aa, synthetic construct
  REGION 1..23: note = Peptide110+Peptide116
QTWWPGCKWCWKMGQYHQLPPLW

SEQ ID NO: 2044 - protein, 23 aa, synthetic construct
  REGION 1..23: note = Peptide110+Peptide117
QTWWPGCKWCMYGKPHLWQLQWP

SEQ ID NO: 2045 - protein, 23 aa, synthetic construct
  REGION 1..23: note = Peptide110+Peptide118
QTWWPGCKWCQMWPGPWHKQYLL

SEQ ID NO: 2046 - protein, 23 aa, synthetic construct
  REGION 1..23: note = Peptide110+Peptide119
QTWWPGCKWCPGQMKWPHWLLYQ

SEQ ID NO: 2047 - protein, 20 aa, synthetic construct
  REGION 1..20: note = Peptide111+Peptide105
TQWCWWGKCPWCTWKGQPCW

SEQ ID NO: 2048 - protein, 19 aa, synthetic construct
  REGION 1..19: note = Peptide111+Peptide106
TQWCWWGKCPWCGRPGQPC

SEQ ID NO: 2049 - protein, 23 aa, synthetic construct
  REGION 1..23: note = Peptide111+Peptide107
TQWCWWGKCPWHWLQLKPGQPMY

SEQ ID NO: 2050 - protein, 20 aa, synthetic construct
  REGION 1..20: note = Peptide111+Peptide108
TQWCWWGKCPTWQKCWWPGC

SEQ ID NO: 2051 - protein, 20 aa, synthetic construct
  REGION 1..20: note = Peptide111+Peptide109
TQWCWWGKCPPKWTWQGCCW

SEQ ID NO: 2052 - protein, 20 aa, synthetic construct
  REGION 1..20: note = Peptide111+Peptide110
TQWCWWGKCPQTWWPGCKWC

SEQ ID NO: 2053 - protein, 20 aa, synthetic construct
  REGION 1..20: note = Peptide111+Peptide111
TQWCWWGKCPTQWCWWGKCP

SEQ ID NO: 2054 - protein, 19 aa, synthetic construct
  REGION 1..19: note = Peptide111+Peptide112
TQWCWWGKCPCPWCQGGRP

SEQ ID NO: 2055 - protein, 19 aa, synthetic construct
  REGION 1..19: note = Peptide111+Peptide113
TQWCWWGKCPPGPCWRGCQ

SEQ ID NO: 2056 - protein, 19 aa, synthetic construct
  REGION 1..19: note = Peptide111+Peptide114
TQWCWWGKCPGWQCRPPCG

SEQ ID NO: 2057 - protein, 19 aa, synthetic construct
  REGION 1..19: note = Peptide111+Peptide115
TQWCWWGKCPCGQRGPPCW

SEQ ID NO: 2058 - protein, 23 aa, synthetic construct
  REGION 1..23: note = Peptide111+Peptide116
TQWCWWGKCPWKMGQYHQLPPLW

SEQ ID NO: 2059 - protein, 23 aa, synthetic construct
  REGION 1..23: note = Peptide111+Peptide117
TQWCWWGKCPMYGKPHLWQLQWP

SEQ ID NO: 2060 - protein, 23 aa, synthetic construct
  REGION 1..23: note = Peptide111+Peptide118
TQWCWWGKCPQMWPGPWHKQYLL

SEQ ID NO: 2061 - protein, 23 aa, synthetic construct
  REGION 1..23: note = Peptide111+Peptide119
TQWCWWGKCPPGQMKWPHWLLYQ

SEQ ID NO: 2062 - protein, 19 aa, synthetic construct
  REGION 1..19: note = Peptide112+Peptide105
CPWCQGGRPWCTWKGQPCW

SEQ ID NO: 2063 - protein, 18 aa, synthetic construct
  REGION 1..18: note = Peptide112+Peptide106
CPWCQGGRPWCGRPGQPC

SEQ ID NO: 2064 - protein, 22 aa, synthetic construct
  REGION 1..22: note = Peptide112+Peptide107
CPWCQGGRPWHWLQLKPGQPMY

SEQ ID NO: 2065 - protein, 19 aa, synthetic construct
  REGION 1..19: note = Peptide112+Peptide108
CPWCQGGRPTWQKCWWPGC

SEQ ID NO: 2066 - protein, 19 aa, synthetic construct
  REGION 1..19: note = Peptide112+Peptide109
CPWCQGGRPPKWTWQGCCW

SEQ ID NO: 2067 - protein, 19 aa, synthetic construct
  REGION 1..19: note = Peptide112+Peptide110
CPWCQGGRPQTWWPGCKWC

SEQ ID NO: 2068 - protein, 19 aa, synthetic construct
  REGION 1..19: note = Peptide112+Peptide111
CPWCQGGRPTQWCWWGKCP

SEQ ID NO: 2069 - protein, 18 aa, synthetic construct
  REGION 1..18: note = Peptide112+Peptide112
CPWCQGGRPCPWCQGGRP

SEQ ID NO: 2070 - protein, 18 aa, synthetic construct
  REGION 1..18: note = Peptide112+Peptide113
CPWCQGGRPPGPCWRGCQ

SEQ ID NO: 2071 - protein, 18 aa, synthetic construct
  REGION 1..18: note = Peptide112+Peptide114
CPWCQGGRPGWQCRPPCG

SEQ ID NO: 2072 - protein, 18 aa, synthetic construct
  REGION 1..18: note = Peptide112+Peptide115
CPWCQGGRPCGQRGPPCW

SEQ ID NO: 2073 - protein, 22 aa, synthetic construct
  REGION 1..22: note = Peptide112+Peptide116
CPWCQGGRPWKMGQYHQLPPLW

SEQ ID NO: 2074 - protein, 22 aa, synthetic construct
  REGION 1..22: note = Peptide112+Peptide117
CPWCQGGRPMYGKPHLWQLQWP

SEQ ID NO: 2075 - protein, 22 aa, synthetic construct
  REGION 1..22: note = Peptide112+Peptide118
CPWCQGGRPQMWPGPWHKQYLL

SEQ ID NO: 2076 - protein, 22 aa, synthetic construct
  REGION 1..22: note = Peptide112+Peptide119
CPWCQGGRPPGQMKWPHWLLYQ

SEQ ID NO: 2077 - protein, 19 aa, synthetic construct
  REGION 1..19: note = Peptide113+Peptide105
PGPCWRGCQWCTWKGQPCW

SEQ ID NO: 2078 - protein, 18 aa, synthetic construct
  REGION 1..18: note = Peptide113+Peptide106
PGPCWRGCQWCGRPGQPC

SEQ ID NO: 2079 - protein, 22 aa, synthetic construct
  REGION 1..22: note = Peptide113+Peptide107
PGPCWRGCQWHWLQLKPGQPMY

SEQ ID NO: 2080 - protein, 19 aa, synthetic construct
  REGION 1..19: note = Peptide113+Peptide108
PGPCWRGCQTWQKCWWPGC

SEQ ID NO: 2081 - protein, 19 aa, synthetic construct
  REGION 1..19: note = Peptide113+Peptide109
PGPCWRGCQPKWTWQGCCW

SEQ ID NO: 2082 - protein, 19 aa, synthetic construct
  REGION 1..19: note = Peptide113+Peptide110
PGPCWRGCQQTWWPGCKWC

SEQ ID NO: 2083 - protein, 19 aa, synthetic construct
  REGION 1..19: note = Peptide113+Peptide111
PGPCWRGCQTQWCWWGKCP

SEQ ID NO: 2084 - protein, 18 aa, synthetic construct
  REGION 1..18: note = Peptide113+Peptide112
PGPCWRGCQCPWCQGGRP

SEQ ID NO: 2085 - protein, 18 aa, synthetic construct
  REGION 1..18: note = Peptide113+Peptide113
PGPCWRGCQPGPCWRGCQ

SEQ ID NO: 2086 - protein, 18 aa, synthetic construct
  REGION 1..18: note = Peptide113+Peptide114
PGPCWRGCQGWQCRPPCG

SEQ ID NO: 2087 - protein, 18 aa, synthetic construct
  REGION 1..18: note = Peptide113+Peptide115
PGPCWRGCQCGQRGPPCW

SEQ ID NO: 2088 - protein, 22 aa, synthetic construct
  REGION 1..22: note = Peptide113+Peptide116
PGPCWRGCQWKMGQYHQLPPLW

SEQ ID NO: 2089 - protein, 22 aa, synthetic construct
  REGION 1..22: note = Peptide113+Peptide117
PGPCWRGCQMYGKPHLWQLQWP

SEQ ID NO: 2090 - protein, 22 aa, synthetic construct
  REGION 1..22: note = Peptide113+Peptide118
PGPCWRGCQQMWPGPWHKQYLL

SEQ ID NO: 2091 - protein, 22 aa, synthetic construct
  REGION 1..22: note = Peptide113+Peptide119
PGPCWRGCQPGQMKWPHWLLYQ

SEQ ID NO: 2092 - protein, 19 aa, synthetic construct
  REGION 1..19: note = Peptide114+Peptide105
GWQCRPPCGWCTWKGQPCW

SEQ ID NO: 2093 - protein, 18 aa, synthetic construct
  REGION 1..18: note = Peptide114+Peptide106
GWQCRPPCGWCGRPGQPC

SEQ ID NO: 2094 - protein, 22 aa, synthetic construct
  REGION 1..22: note = Peptide114+Peptide107
GWQCRPPCGWHWLQLKPGQPMY

SEQ ID NO: 2095 - protein, 19 aa, synthetic construct
  REGION 1..19: note = Peptide114+Peptide108
GWQCRPPCGTWQKCWWPGC

SEQ ID NO: 2096 - protein, 19 aa, synthetic construct
  REGION 1..19: note = Peptide114+Peptide109
GWQCRPPCGPKWTWQGCCW

SEQ ID NO: 2097 - protein, 19 aa, synthetic construct
  REGION 1..19: note = Peptide114+Peptide110
GWQCRPPCGQTWWPGCKWC

SEQ ID NO: 2098 - protein, 19 aa, synthetic construct
  REGION 1..19: note = Peptide114+Peptide111
GWQCRPPCGTQWCWWGKCP

SEQ ID NO: 2099 - protein, 18 aa, synthetic construct
  REGION 1..18: note = Peptide114+Peptide112
GWQCRPPCGCPWCQGGRP

SEQ ID NO: 2100 - protein, 18 aa, synthetic construct
  REGION 1..18: note = Peptide114+Peptide113
GWQCRPPCGPGPCWRGCQ

SEQ ID NO: 2101 - protein, 18 aa, synthetic construct
  REGION 1..18: note = Peptide114+Peptide114
GWQCRPPCGGWQCRPPCG

SEQ ID NO: 2102 - protein, 18 aa, synthetic construct
  REGION 1..18: note = Peptide114+Peptide115
GWQCRPPCGCGQRGPPCW

SEQ ID NO: 2103 - protein, 22 aa, synthetic construct
  REGION 1..22: note = Peptide114+Peptide116
GWQCRPPCGWKMGQYHQLPPLW

SEQ ID NO: 2104 - protein, 22 aa, synthetic construct
  REGION 1..22: note = Peptide114+Peptide117
GWQCRPPCGMYGKPHLWQLQWP

SEQ ID NO: 2105 - protein, 22 aa, synthetic construct
  REGION 1..22: note = Peptide114+Peptide118
GWQCRPPCGQMWPGPWHKQYLL

SEQ ID NO: 2106 - protein, 22 aa, synthetic construct
  REGION 1..22: note = Peptide114+Peptide119
GWQCRPPCGPGQMKWPHWLLYQ

SEQ ID NO: 2107 - protein, 19 aa, synthetic construct
  REGION 1..19: note = Peptide115+Peptide105
CGQRGPPCWWCTWKGQPCW

SEQ ID NO: 2108 - protein, 18 aa, synthetic construct
  REGION 1..18: note = Peptide115+Peptide106
CGQRGPPCWWCGRPGQPC

SEQ ID NO: 2109 - protein, 22 aa, synthetic construct
  REGION 1..22: note = Peptide115+Peptide107
CGQRGPPCWWHWLQLKPGQPMY

SEQ ID NO: 2110 - protein, 19 aa, synthetic construct
  REGION 1..19: note = Peptide115+Peptide108
CGQRGPPCWTWQKCWWPGC

SEQ ID NO: 2111 - protein, 19 aa, synthetic construct
  REGION 1..19: note = Peptide115+Peptide109
CGQRGPPCWPKWTWQGCCW

SEQ ID NO: 2112 - protein, 19 aa, synthetic construct
  REGION 1..19: note = Peptide115+Peptide110
CGQRGPPCWQTWWPGCKWC

SEQ ID NO: 2113 - protein, 19 aa, synthetic construct
  REGION 1..19: note = Peptide115+Peptide111
CGQRGPPCWTQWCWWGKCP

SEQ ID NO: 2114 - protein, 18 aa, synthetic construct
  REGION 1..18: note = Peptide115+Peptide112
CGQRGPPCWCPWCQGGRP

SEQ ID NO: 2115 - protein, 18 aa, synthetic construct
  REGION 1..18: note = Peptide115+Peptide113
CGQRGPPCWPGPCWRGCQ

SEQ ID NO: 2116 - protein, 18 aa, synthetic construct
  REGION 1..18: note = Peptide115+Peptide114
CGQRGPPCWGWQCRPPCG

SEQ ID NO: 2117 - protein, 18 aa, synthetic construct
  REGION 1..18: note = Peptide115+Peptide115
CGQRGPPCWCGQRGPPCW

SEQ ID NO: 2118 - protein, 22 aa, synthetic construct
  REGION 1..22: note = Peptide115+Peptide116
CGQRGPPCWWKMGQYHQLPPLW

SEQ ID NO: 2119 - protein, 22 aa, synthetic construct
  REGION 1..22: note = Peptide115+Peptide117
CGQRGPPCWMYGKPHLWQLQWP

SEQ ID NO: 2120 - protein, 22 aa, synthetic construct
  REGION 1..22: note = Peptide115+Peptide118
CGQRGPPCWQMWPGPWHKQYLL

SEQ ID NO: 2121 - protein, 22 aa, synthetic construct
  REGION 1..22: note = Peptide115+Peptide119
CGQRGPPCWPGQMKWPHWLLYQ

SEQ ID NO: 2122 - protein, 23 aa, synthetic construct
  REGION 1..23: note = Peptide116+Peptide105
WKMGQYHQLPPLWWCTWKGQPCW

SEQ ID NO: 2123 - protein, 22 aa, synthetic construct
  REGION 1..22: note = Peptide116+Peptide106
WKMGQYHQLPPLWWCGRPGQPC

SEQ ID NO: 2124 - protein, 26 aa, synthetic construct
  REGION 1..26: note = Peptide116+Peptide107
WKMGQYHQLPPLWWHWLQLKPGQPMY

SEQ ID NO: 2125 - protein, 23 aa, synthetic construct
  REGION 1..23: note = Peptide116+Peptide108
WKMGQYHQLPPLWTWQKCWWPGC

SEQ ID NO: 2126 - protein, 23 aa, synthetic construct
  REGION 1..23: note = Peptide116+Peptide109
WKMGQYHQLPPLWPKWTWQGCCW

SEQ ID NO: 2127 - protein, 23 aa, synthetic construct
  REGION 1..23: note = Peptide116+Peptide110
WKMGQYHQLPPLWQTWWPGCKWC

SEQ ID NO: 2128 - protein, 23 aa, synthetic construct
  REGION 1..23: note = Peptide116+Peptide111
WKMGQYHQLPPLWTQWCWWGKCP

SEQ ID NO: 2129 - protein, 22 aa, synthetic construct
  REGION 1..22: note = Peptide116+Peptide112
WKMGQYHQLPPLWCPWCQGGRP

SEQ ID NO: 2130 - protein, 22 aa, synthetic construct
  REGION 1..22: note = Peptide116+Peptide113
WKMGQYHQLPPLWPGPCWRGCQ

SEQ ID NO: 2131 - protein, 22 aa, synthetic construct
  REGION 1..22: note = Peptide116+Peptide114
WKMGQYHQLPPLWGWQCRPPCG

SEQ ID NO: 2132 - protein, 22 aa, synthetic construct
  REGION 1..22: note = Peptide116+Peptide115
WKMGQYHQLPPLWCGQRGPPCW

SEQ ID NO: 2133 - protein, 26 aa, synthetic construct
  REGION 1..26: note = Peptide116+Peptide116
WKMGQYHQLPPLWWKMGQYHQLPPLW

SEQ ID NO: 2134 - protein, 26 aa, synthetic construct
  REGION 1..26: note = Peptide116+Peptide117
WKMGQYHQLPPLWMYGKPHLWQLQWP

SEQ ID NO: 2135 - protein, 26 aa, synthetic construct
  REGION 1..26: note = Peptide116+Peptide118
WKMGQYHQLPPLWQMWPGPWHKQYLL

SEQ ID NO: 2136 - protein, 26 aa, synthetic construct
  REGION 1..26: note = Peptide116+Peptide119
WKMGQYHQLPPLWPGQMKWPHWLLYQ

SEQ ID NO: 2137 - protein, 23 aa, synthetic construct
  REGION 1..23: note = Peptide117+Peptide105
MYGKPHLWQLQWPWCTWKGQPCW

SEQ ID NO: 2138 - protein, 22 aa, synthetic construct
  REGION 1..22: note = Peptide117+Peptide106
MYGKPHLWQLQWPWCGRPGQPC

SEQ ID NO: 2139 - protein, 26 aa, synthetic construct
  REGION 1..26: note = Peptide117+Peptide107
MYGKPHLWQLQWPWHWLQLKPGQPMY

SEQ ID NO: 2140 - protein, 23 aa, synthetic construct
  REGION 1..23: note = Peptide117+Peptide108
MYGKPHLWQLQWPTWQKCWWPGC

SEQ ID NO: 2141 - protein, 23 aa, synthetic construct
  REGION 1..23: note = Peptide117+Peptide109
MYGKPHLWQLQWPPKWTWQGCCW

SEQ ID NO: 2142 - protein, 23 aa, synthetic construct
  REGION 1..23: note = Peptide117+Peptide110
MYGKPHLWQLQWPQTWWPGCKWC

SEQ ID NO: 2143 - protein, 23 aa, synthetic construct
  REGION 1..23: note = Peptide117+Peptide111
MYGKPHLWQLQWPTQWCWWGKCP

SEQ ID NO: 2144 - protein, 22 aa, synthetic construct
  REGION 1..22: note = Peptide117+Peptide112
MYGKPHLWQLQWPCPWCQGGRP

SEQ ID NO: 2145 - protein, 22 aa, synthetic construct
  REGION 1..22: note = Peptide117+Peptide113
MYGKPHLWQLQWPPGPCWRGCQ

SEQ ID NO: 2146 - protein, 22 aa, synthetic construct
  REGION 1..22: note = Peptide117+Peptide114
MYGKPHLWQLQWPGWQCRPPCG

SEQ ID NO: 2147 - protein, 22 aa, synthetic construct
  REGION 1..22: note = Peptide117+Peptide115
MYGKPHLWQLQWPCGQRGPPCW

SEQ ID NO: 2148 - protein, 26 aa, synthetic construct
  REGION 1..26: note = Peptide117+Peptide116
MYGKPHLWQLQWPWKMGQYHQLPPLW

SEQ ID NO: 2149 - protein, 26 aa, synthetic construct
  REGION 1..26: note = Peptide117+Peptide117
MYGKPHLWQLQWPMYGKPHLWQLQWP

SEQ ID NO: 2150 - protein, 26 aa, synthetic construct
  REGION 1..26: note = Peptide117+Peptide118
MYGKPHLWQLQWPQMWPGPWHKQYLL

SEQ ID NO: 2151 - protein, 26 aa, synthetic construct
  REGION 1..26: note = Peptide117+Peptide119
MYGKPHLWQLQWPPGQMKWPHWLLYQ

SEQ ID NO: 2152 - protein, 23 aa, synthetic construct
  REGION 1..23: note = Peptide118+Peptide105
QMWPGPWHKQYLLWCTWKGQPCW

SEQ ID NO: 2153 - protein, 22 aa, synthetic construct
  REGION 1..22: note = Peptide118+Peptide106
QMWPGPWHKQYLLWCGRPGQPC

SEQ ID NO: 2154 - protein, 26 aa, synthetic construct
  REGION 1..26: note = Peptide118+Peptide107
QMWPGPWHKQYLLWHWLQLKPGQPMY

SEQ ID NO: 2155 - protein, 23 aa, synthetic construct
  REGION 1..23: note = Peptide118+Peptide108
QMWPGPWHKQYLLTWQKCWWPGC

SEQ ID NO: 2156 - protein, 23 aa, synthetic construct
  REGION 1..23: note = Peptide118+Peptide109
QMWPGPWHKQYLLPKWTWQGCCW

SEQ ID NO: 2157 - protein, 23 aa, synthetic construct
  REGION 1..23: note = Peptide118+Peptide110
QMWPGPWHKQYLLQTWWPGCKWC

SEQ ID NO: 2158 - protein, 23 aa, synthetic construct
  REGION 1..23: note = Peptide118+Peptide111
QMWPGPWHKQYLLTQWCWWGKCP

SEQ ID NO: 2159 - protein, 22 aa, synthetic construct
  REGION 1..22: note = Peptide118+Peptide112
QMWPGPWHKQYLLCPWCQGGRP

SEQ ID NO: 2160 - protein, 22 aa, synthetic construct
  REGION 1..22: note = Peptide118+Peptide113
QMWPGPWHKQYLLPGPCWRGCQ

SEQ ID NO: 2161 - protein, 22 aa, synthetic construct
  REGION 1..22: note = Peptide118+Peptide114
QMWPGPWHKQYLLGWQCRPPCG

SEQ ID NO: 2162 - protein, 22 aa, synthetic construct
  REGION 1..22: note = Peptide118+Peptide115
QMWPGPWHKQYLLCGQRGPPCW

SEQ ID NO: 2163 - protein, 26 aa, synthetic construct
  REGION 1..26: note = Peptide118+Peptide116
QMWPGPWHKQYLLWKMGQYHQLPPLW

SEQ ID NO: 2164 - protein, 26 aa, synthetic construct
  REGION 1..26: note = Peptide118+Peptide117
QMWPGPWHKQYLLMYGKPHLWQLQWP

SEQ ID NO: 2165 - protein, 26 aa, synthetic construct
  REGION 1..26: note = Peptide118+Peptide118
QMWPGPWHKQYLLQMWPGPWHKQYLL

SEQ ID NO: 2166 - protein, 26 aa, synthetic construct
  REGION 1..26: note = Peptide118+Peptide119
QMWPGPWHKQYLLPGQMKWPHWLLYQ

SEQ ID NO: 2167 - protein, 23 aa, synthetic construct
  REGION 1..23: note = Peptide119+Peptide105
PGQMKWPHWLLYQWCTWKGQPCW

SEQ ID NO: 2168 - protein, 22 aa, synthetic construct
  REGION 1..22: note = Peptide119+Peptide106
PGQMKWPHWLLYQWCGRPGQPC

SEQ ID NO: 2169 - protein, 26 aa, synthetic construct
  REGION 1..26: note = Peptide119+Peptide107
PGQMKWPHWLLYQWHWLQLKPGQPMY

SEQ ID NO: 2170 - protein, 23 aa, synthetic construct
  REGION 1..23: note = Peptide119+Peptide108
PGQMKWPHWLLYQTWQKCWWPGC

SEQ ID NO: 2171 - protein, 23 aa, synthetic construct
  REGION 1..23: note = Peptide119+Peptide109
PGQMKWPHWLLYQPKWTWQGCCW

SEQ ID NO: 2172 - protein, 23 aa, synthetic construct
  REGION 1..23: note = Peptide119+Peptide110
PGQMKWPHWLLYQQTWWPGCKWC

SEQ ID NO: 2173 - protein, 23 aa, synthetic construct
  REGION 1..23: note = Peptide119+Peptide111
PGQMKWPHWLLYQTQWCWWGKCP

SEQ ID NO: 2174 - protein, 22 aa, synthetic construct
  REGION 1..22: note = Peptide119+Peptide112
PGQMKWPHWLLYQCPWCQGGRP

SEQ ID NO: 2175 - protein, 22 aa, synthetic construct
  REGION 1..22: note = Peptide119+Peptide113
PGQMKWPHWLLYQPGPCWRGCQ

SEQ ID NO: 2176 - protein, 22 aa, synthetic construct
  REGION 1..22: note = Peptide119+Peptide114
PGQMKWPHWLLYQGWQCRPPCG

SEQ ID NO: 2177 - protein, 22 aa, synthetic construct
  REGION 1..22: note = Peptide119+Peptide115
PGQMKWPHWLLYQCGQRGPPCW

SEQ ID NO: 2178 - protein, 26 aa, synthetic construct
  REGION 1..26: note = Peptide119+Peptide116
PGQMKWPHWLLYQWKMGQYHQLPPLW

SEQ ID NO: 2179 - protein, 26 aa, synthetic construct
  REGION 1..26: note = Peptide119+Peptide117
PGQMKWPHWLLYQMYGKPHLWQLQWP

SEQ ID NO: 2180 - protein, 26 aa, synthetic construct
  REGION 1..26: note = Peptide119+Peptide118
PGQMKWPHWLLYQQMWPGPWHKQYLL

SEQ ID NO: 2181 - protein, 26 aa, synthetic construct
  REGION 1..26: note = Peptide119+Peptide119
PGQMKWPHWLLYQPGQMKWPHWLLYQ

SEQ ID NO: 2182 - protein, 10 aa, unidentified
  REGION 1..10: note = Fusarium spp.
WCTWKGQPCW

SEQ ID NO: 2183 - protein, 9 aa, unidentified
  REGION 1..9: note = Botrytis spp.
WCGRPGQPC

SEQ ID NO: 2184 - protein, 13 aa, Saccharomyces cerevisiae
WHWLQLKPGQPMY

SEQ ID NO: 2185 - protein, 13 aa, synthetic construct
  REGION 1..13: note = Synthetic Construct
WKMGQYHQLPPLW

SEQ ID NO: 2186 - protein, 14 aa, Saccharomyces cerevisiae
WHWLQLKPGQPMYG

SEQ ID NO: 2187 - protein, 14 aa, Saccharomyces cerevisiae
GWHWLQLKPGQPMY

SEQ ID NO: 2188 - protein, 26 aa, Saccharomyces cerevisiae
WHWLQLKPGQPMYWHWLQLKPGQPMY

SEQ ID NO: 2189 - protein, 31 aa, Saccharomyces cerevisiae
WHWLQLKPGQPMYGGGGSWHWLQLKPGQPMY

SEQ ID NO: 2190-2193 - skipped (4 entries)

SEQ ID NO: 2194 - protein, 8 aa, synthetic construct
  REGION 1..8: note = Synthetic Construct
  VARIANT 1: note = Can be present in repeats of 0-1
  VARIANT 2..5: note = Can be present in repeats of 3-10
MYEYKYEY

SEQ ID NO: 2195 - protein, 21 aa, synthetic construct
  REGION 1..21: note = Synthetic Construct
MVKVKCYVLFTALLSSLCAYG

SEQ ID NO: 2196-2198 - skipped (3 entries)

SEQ ID NO: 2199 - protein, 10 aa, Fusarium graminearum
TWQKCWWPGC

SEQ ID NO: 2200 - protein, 10 aa, Fusarium graminearum
PKWTWQGCCW

SEQ ID NO: 2201 - protein, 10 aa, Fusarium graminearum
QTWWPGCKWC

SEQ ID NO: 2202 - protein, 10 aa, Fusarium graminearum
TQWCWWGKCP

SEQ ID NO: 2203 - protein, 9 aa, Botrytis cinerea
CPWCQGGRP

SEQ ID NO: 2204 - protein, 9 aa, Botrytis cinerea
PGPCWRGCQ

SEQ ID NO: 2205 - protein, 9 aa, Botrytis cinerea
GWQCRPPCG

SEQ ID NO: 2206 - protein, 9 aa, Botrytis cinerea
CGQRGPPCW

SEQ ID NO: 2207 - skipped

SEQ ID NO: 2208 - protein, 13 aa, Saccharomyces cerevisiae
MYGKPHLWQLQWP

SEQ ID NO: 2209 - protein, 13 aa, Saccharomyces cerevisiae
QMWPGPWHKQYLL

SEQ ID NO: 2210 - protein, 13 aa, Saccharomyces cerevisiae
PGQMKWPHWLLYQ

SEQ ID NO: 2211-2230 - skipped (20 entries)

SEQ ID NO: 2231 - protein, 23 aa, synthetic construct
  REGION 1..23: note = Synthetic Construct
WHWLQLKPGQPMYWCTWKGQPCW

SEQ ID NO: 2232 - protein, 27 aa, synthetic construct
  REGION 1..27: note = Synthetic Construct
WHWLQLKPGQPMYGGGGWCTWKGQPCW

SEQ ID NO: 2233 - protein, 23 aa, synthetic construct
  REGION 1..23: note = Synthetic Construct
WCTWKGQPCWWHWLQLKPGQPMY

SEQ ID NO: 2234 - protein, 27 aa, synthetic construct
  REGION 1..27: note = Synthetic Construct
WCTWKGQPCWGGGGWHWLQLKPGQPMY

SEQ ID NO: 2235 - protein, 22 aa, synthetic construct
  REGION 1..22: note = Synthetic Construct
WHWLQLKPGQPMYWCGRPGQPC

SEQ ID NO: 2236 - protein, 26 aa, synthetic construct
  REGION 1..26: note = Synthetic Construct
WHWLQLKPGQPMYGGGGWCGRPGQPC

SEQ ID NO: 2237 - protein, 19 aa, synthetic construct
  REGION 1..19: note = Synthetic Construct
WCTWKGQPCWWCGRPGQPC

SEQ ID NO: 2238 - protein, 23 aa, synthetic construct
  REGION 1..23: note = Synthetic Construct
WCTWKGQPCWGGGGWCGRPGQPC

SEQ ID NO: 2239 - protein, 34 aa, synthetic construct
  REGION 1..34: note = Synthetic Construct
MVKVKCYVLFTALLSSLCAYGWHWLQLKPGQPMY

SEQ ID NO: 2240 - protein, 21 aa, synthetic construct
  REGION 1..21: note = Synthetic Construct
WHWLQLKPGQPMYRRRRRRRR

SEQ ID NO: 2241 - protein, 28 aa, synthetic construct
  REGION 1..28: note = Synthetic Construct
YEYKYEYKYEYKYEYWHWLQLKPGQPMY

SEQ ID NO: 2242 - protein, 29 aa, synthetic construct
  REGION 1..29: note = Synthetic Construct
MYEYKYEYKYEYKYEYWHWLQLKPGQPMY

SEQ ID NO: 2243 - protein, 35 aa, synthetic construct
  REGION 1..35: note = Synthetic Construct
WHWLQLKPGQPMYGGGGWCTWKGQPCWRRRRRRRR

SEQ ID NO: 2244 - DNA, 48 bp, synthetic construct
  misc_feature 1..48: note = T7 terminator
  source 1..48: mol_type = other DNA
ctagcataaccccttggggcctctaaacgggtcttgaggggttttttg

SEQ ID NO: 2245 - DNA, 19 bp, synthetic construct
  misc_feature 1..19: note = T7 promoter
  source 1..19: mol_type = other DNA
taatacgactcactatagg

SEQ ID NO: 2246 - DNA, 18 bp, synthetic construct
  misc_feature 1..18: note = 6x His Tag
  source 1..18: mol_type = other DNA
catcatcatcatcatcac

SEQ ID NO: 2247 - DNA, 21 bp, synthetic construct
  misc_feature 1..21: note = TEV cleavage site
  source 1..21: mol_type = other DNA
gaaaacttgtatttccagggc

SEQ ID NO: 2248 - DNA, 39 bp, synthetic construct
  misc_feature 1..39: note = S. cerevisiae Alpha-pheromone (pep 107)
  source 1..39: mol_type = other DNA
tggcattggctgcagctgaaaccgggccagccgatgtat

SEQ ID NO: 2249 - DNA, 157 bp, synthetic construct
  misc_feature 1..157: note = CGI Construct
  source 1..157: mol_type = other DNA
taatacgactcactataggcatcatcatcatcatcacagcagcggcagagaaaacttgtatttccagggctggcattggctgcagctgaaaccgggccagccgatgtatctagcataaccccttggggcctctaaacgggtcttgaggggttttttg

SEQ ID NO: 2250 - DNA, 30 bp, synthetic construct
  misc_feature 1..30: note = Botrytis cinerea Alpha-pheromone (pep 106)
  source 1..30: mol_type = other DNA
tggtgcggccgcccgggccagccgtgctaa

SEQ ID NO: 2251 - skipped

SEQ ID NO: 2252 - DNA, 15 bp, synthetic construct
  misc_feature 1..15: note = Translation Initiation Region (TIR)
  source 1..15: mol_type = other DNA
tcgaggatggctcag

SEQ ID NO: 2253 - protein, 13 aa, Aaosphaeria arxii
  source 1..13: note = CBS 175.79
CGMPGQPCDRLKR

SEQ ID NO: 2254 - protein, 13 aa, Aaosphaeria arxii
  source 1..13: note = CBS 175.79
CLFVGQSCSVAKR

SEQ ID NO: 2255 - protein, 13 aa, Aaosphaeria arxii
  source 1..13: note = CBS 175.79
CRWPGQPCSKDKR

SEQ ID NO: 2256 - protein, 13 aa, Aaosphaeria arxii
  source 1..13: note = CBS 175.79
CRWPGQPCSKEKR

SEQ ID NO: 2257 - protein, 13 aa, Aaosphaeria arxii
  source 1..13: note = CBS 175.79
CRWPGQPCSKKRE

SEQ ID NO: 2258 - protein, 13 aa, Aaosphaeria arxii
  source 1..13: note = CBS 175.79
CTFGDSVCSKIKR

SEQ ID NO: 2259 - protein, 13 aa, Acremonium chrysogenum
  source 1..13: note = ATCC 11550
CHRPGGECFKAKR

SEQ ID NO: 2260 - protein, 14 aa, Acremonium chrysogenum
  source 1..14: note = ATCC 11550
WCYIETYDCPRAKR

SEQ ID NO: 2261 - protein, 14 aa, Akanthomyces lecanii
  source 1..14: note = RCEF 1005
WCMRPAQPCWKLKR

SEQ ID NO: 2262 - protein, 14 aa, Akanthomyces lecanii
  source 1..14: note = RCEF 1005
WCMRPAQPCWKTRR

SEQ ID NO: 2263 - protein, 14 aa, Amniculicola lignicola
  source 1..14: note = CBS 123094
WCRFPGQPCGKAKR

SEQ ID NO: 2264 - protein, 14 aa, Amniculicola lignicola
  source 1..14: note = CBS 123094
WCRFPGQPCGKDKR

SEQ ID NO: 2265 - protein, 14 aa, Amniculicola lignicola
  source 1..14: note = CBS 123094
WCRFPGQPCGKNKR

SEQ ID NO: 2266 - protein, 13 aa, Amorphotheca resinae
  source 1..13: note = ATCC 22711
CGKVGQPCGKAKR

SEQ ID NO: 2267 - protein, 13 aa, Amorphotheca resinae
  source 1..13: note = ATCC 22711
CGKVGQPCGKIKR

SEQ ID NO: 2268 - protein, 13 aa, Amorphotheca resinae
  source 1..13: note = ATCC 22711
CNLVGGACYEAKR

SEQ ID NO: 2269 - protein, 25 aa, Amorphotheca resinae
  source 1..25: note = ATCC 22711
LALPLPEAYAEAKCGEFGECGRVKR

SEQ ID NO: 2270 - protein, 21 aa, Aplosporella prunicola
  source 1..21: note = CBS 121167
WKAPWPRFCFRPGQPCTKAKR

SEQ ID NO: 2271 - protein, 21 aa, Aplosporella prunicola
  source 1..21: note = CBS 121167
WKAPWPRFCFRPGQPCTKVKR

SEQ ID NO: 2272 - protein, 17 aa, Aplosporella prunicola
  source 1..17: note = CBS 121167
WPRFCFRPGQPCTKAKR

SEQ ID NO: 2273 - protein, 14 aa, Aspergillus aculeatinus
  source 1..14: note = CBS 121060
WCYLPGQPCAMMKR

SEQ ID NO: 2274 - protein, 14 aa, Aspergillus aculeatinus
  source 1..14: note = CBS 121060
WCYLPGQPCQKIKR

SEQ ID NO: 2275 - protein, 14 aa, Aspergillus aculeatus
  source 1..14: note = ATCC 16872
WCYLPGQPCAMIKR

SEQ ID NO: 2276 - protein, 14 aa, Aspergillus aculeatus
  source 1..14: note = ATCC 16872
WCYLPGQPCQKIKR

SEQ ID NO: 2277 - protein, 14 aa, Aspergillus alliaceus
RCTGLAQGCYMLKR

SEQ ID NO: 2278 - protein, 14 aa, Aspergillus alliaceus
WCHLPGQGCLKFKR

SEQ ID NO: 2279 - protein, 14 aa, Aspergillus alliaceus
RCTGLAQGCYMLKR

SEQ ID NO: 2280 - protein, 14 aa, Aspergillus alliaceus
WCHLPGQGCLKFKR

SEQ ID NO: 2281 - protein, 14 aa, Aspergillus arachidicola
WCALPAQGCYMLKR

SEQ ID NO: 2282 - protein, 14 aa, Aspergillus arachidicola
WCALPGQGCLKAKR

SEQ ID NO: 2283 - protein, 14 aa, Aspergillus avenaceus
WCHGPGQGCYKVKR

SEQ ID NO: 2284 - protein, 14 aa, Aspergillus avenaceus
WCHGPGQGCYMFKR

SEQ ID NO: 2285 - protein, 14 aa, Aspergillus awamori
WCVLPGQPCNKIKR

SEQ ID NO: 2286 - protein, 14 aa, Aspergillus awamori
WCVLPGQPCNMIKR

SEQ ID NO: 2287 - protein, 14 aa, Aspergillus bertholletiae
WCALPGQGCLKAKR

SEQ ID NO: 2288 - protein, 14 aa, Aspergillus bertholletiae
WCALPGQGCYMLKR

SEQ ID NO: 2289 - protein, 14 aa, Aspergillus bombycis
WCALPAQGCYMLKR

SEQ ID NO: 2290 - protein, 14 aa, Aspergillus bombycis
WCALPGQGCLKAKR

SEQ ID NO: 2291 - protein, 14 aa, Aspergillus brasiliensis
  source 1..14: note = CBS 101740
WCVLPGQPCNKIKR

SEQ ID NO: 2292 - protein, 14 aa, Aspergillus brasiliensis
  source 1..14: note = CBS 101740
WCVLPGQPCNMIKR

SEQ ID NO: 2293 - protein, 14 aa, Aspergillus brunneoviolaceus
  source 1..14: note = CBS 621.78
WCYLPGQPCAMMKR

SEQ ID NO: 2294 - protein, 14 aa, Aspergillus brunneoviolaceus
  source 1..14: note = CBS 621.78
WCYLPGQPCQKIKR

SEQ ID NO: 2295 - protein, 14 aa, Aspergillus campestris
  source 1..14: note = IBT 28561
WCHFPGQGCQKAKR

SEQ ID NO: 2296 - protein, 14 aa, Aspergillus campestris
  source 1..14: note = IBT 28561
WCHFPGQGCYMLKR

SEQ ID NO: 2297 - protein, 14 aa, Aspergillus candidus
WCHFPGQGCQKAKR

SEQ ID NO: 2298 - protein, 14 aa, Aspergillus candidus
WCHFPGQGCYMLKR

SEQ ID NO: 2299 - protein, 14 aa, Aspergillus carbonarius
  source 1..14: note = ITEM 5010
WCNLPGQPCNKIKR

SEQ ID NO: 2300 - protein, 14 aa, Aspergillus carbonarius
  source 1..14: note = ITEM 5010
WCNLPGQPCNMIKR

SEQ ID NO: 2301 - protein, 14 aa, Aspergillus carbonarius
  source 1..14: note = ITEM 5010
WCNLPGQPCNKIKR

SEQ ID NO: 2302 - protein, 14 aa, Aspergillus carbonarius
  source 1..14: note = ITEM 5010
WCNLPGQPCNMIKR

SEQ ID NO: 2303 - protein, 14 aa, Aspergillus clavatus
  source 1..14: note = NRRL 1
WCELPGQGCHKVKR

SEQ ID NO: 2304 - protein, 14 aa, Aspergillus clavatus
  source 1..14: note = NRRL 1
WCELPGQGCYMIKR

SEQ ID NO: 2305 - protein, 14 aa, Aspergillus coremiiformis
WCNGPGQGCYMFKR

SEQ ID NO: 2306 - protein, 14 aa, Aspergillus coremiiformis
WCRLPGQGCLKVKR

SEQ ID NO: 2307 - protein, 14 aa, Aspergillus costaricaensis
  source 1..14: note = CBS 115574
WCHLPGQPCNMIKR

SEQ ID NO: 2308 - protein, 14 aa, Aspergillus costaricaensis
  source 1..14: note = CBS 115574
WCVLPGQPCNKIKR

SEQ ID NO: 2309 - protein, 14 aa, Aspergillus ellipticus
  source 1..14: note = CBS 707.79
WCVLPGQPCNKIKR

SEQ ID NO: 2310 - protein, 14 aa, Aspergillus ellipticus
  source 1..14: note = CBS 707.79
WCVLPGQPCNKMKR

SEQ ID NO: 2311 - protein, 14 aa, Aspergillus eucalypticola
  source 1..14: note = CBS 122712
WCVLPGQPCNKIKR

SEQ ID NO: 2312 - protein, 14 aa, Aspergillus eucalypticola
  source 1..14: note = CBS 122712
WCYLPGQPCNMIKR

SEQ ID NO: 2313 - protein, 14 aa, Aspergillus fijiensis
  source 1..14: note = CBS 313.89
WCYLPGQPCAMMKR

SEQ ID NO: 2314 - protein, 14 aa, Aspergillus fijiensis
  source 1..14: note = CBS 313.89
WCYLPGQPCQKIKR

SEQ ID NO: 2315 - protein, 14 aa, Aspergillus fischeri
  source 1..14: note = NRRL 181
WCHLPGQGCAKAKR

SEQ ID NO: 2316 - protein, 14 aa, Aspergillus fischeri
  source 1..14: note = NRRL 181
WCHLPGQGCYMLKR

SEQ ID NO: 2317 - protein, 14 aa, Aspergillus flavus
WCALPGQGCLKAKR

SEQ ID NO: 2318 - protein, 14 aa, Aspergillus flavus
WCSLPAQGCYMLKR

SEQ ID NO: 2319 - protein, 14 aa, Aspergillus flavus
WCALPGQGCLKAKR

SEQ ID NO: 2320 - protein, 14 aa, Aspergillus flavus
WCSLPAQGCYMLKR

SEQ ID NO: 2321 - protein, 14 aa, Aspergillus flavus
WCALPGQGCLKAKR

SEQ ID NO: 2322 - protein, 14 aa, Aspergillus flavus
WCSLPAQGCYMLKR

SEQ ID NO: 2323 - protein, 14 aa, Aspergillus flavus
WCALPGQGCLKAKR

SEQ ID NO: 2324 - protein, 14 aa, Aspergillus flavus
WCSLPAQGCYMLKR

SEQ ID NO: 2325 - protein, 14 aa, Aspergillus flavus
WCALPGQGCLKAKR

SEQ ID NO: 2326 - protein, 14 aa, Aspergillus flavus
WCSLPAQGCYMLKR

SEQ ID NO: 2327 - protein, 14 aa, Aspergillus flavus
WCALPGQGCLKAKR

SEQ ID NO: 2328 - protein, 14 aa, Aspergillus flavus
WCSLPAQGCYMLKR

SEQ ID NO: 2329 - protein, 14 aa, Aspergillus fumigatiaffinis
WCHLPGQGCAKAKR

SEQ ID NO: 2330 - protein, 14 aa, Aspergillus fumigatiaffinis
WCHLPGQGCYMLKR

SEQ ID NO: 2331 - protein, 14 aa, Aspergillus fumigatiaffinis
WCHLPGQGCAKAKR

SEQ ID NO: 2332 - protein, 14 aa, Aspergillus fumigatiaffinis
WCHLPGQGCYMLKR

SEQ ID NO: 2333 - protein, 14 aa, Aspergillus fumigatiaffinis
WCHLPGQGCAKAKR

SEQ ID NO: 2334 - protein, 14 aa, Aspergillus fumigatiaffinis
WCHLPGQGCYMLKR

SEQ ID NO: 2335 - protein, 14 aa, Aspergillus fumigatiaffinis
WCHLPGQGCAKAKR

SEQ ID NO: 2336 - protein, 14 aa, Aspergillus fumigatiaffinis
WCHLPGQGCYMLKR

SEQ ID NO: 2337 - protein, 14 aa, Aspergillus fumigatus
WCHLPGQGCAKAKR

SEQ ID NO: 2338 - protein, 14 aa, Aspergillus fumigatus
WCHLPGQGCYMLKR

SEQ ID NO: 2339 - protein, 14 aa, Aspergillus fumigatus
WCHLPGQGCAKAKR

SEQ ID NO: 2340 - protein, 14 aa, Aspergillus fumigatus
WCHLPGQGCYMLKR

SEQ ID NO: 2341 - protein, 14 aa, Aspergillus fumigatus
WCHLPGQGCAKAKR

SEQ ID NO: 2342 - protein, 14 aa, Aspergillus fumigatus
WCHLPGQGCYMLKR

SEQ ID NO: 2343 - protein, 14 aa, Aspergillus fumigatus
WCHLPGQGCAKAKR

SEQ ID NO: 2344 - protein, 14 aa, Aspergillus fumigatus
WCHLPGQGCYMLKR

SEQ ID NO: 2345 - protein, 14 aa, Aspergillus fumigatus
WCHLPGQGCAKAKR

SEQ ID NO: 2346 - protein, 14 aa, Aspergillus fumigatus
WCHLPGQGCYMLKR

SEQ ID NO: 2347 - protein, 14 aa, Aspergillus fumigatus
WCHLPGQGCAKAKR

SEQ ID NO: 2348 - protein, 14 aa, Aspergillus fumigatus
WCHLPGQGCYMLKR

SEQ ID NO: 2349 - protein, 14 aa, Aspergillus fumigatus
WCHLPGQGCAKAKR

SEQ ID NO: 2350 - protein, 14 aa, Aspergillus fumigatus
WCHLPGQGCYMLKR

SEQ ID NO: 2351 - protein, 14 aa, Aspergillus fumigatus
WCHLPGQGCAKAKR

SEQ ID NO: 2352 - protein, 14 aa, Aspergillus fumigatus
WCHLPGQGCYMLKR

SEQ ID NO: 2353 - protein, 14 aa, Aspergillus fumigatus
WCHLPGQGCAKAKR

SEQ ID NO: 2354 - protein, 14 aa, Aspergillus fumigatus
WCHLPGQGCYMLKR

SEQ ID NO: 2355 - protein, 14 aa, Aspergillus fumigatus
WCHLPGQGCAKAKR

SEQ ID NO: 2356 - protein, 14 aa, Aspergillus fumigatus
WCHLPGQGCYMLKR

SEQ ID NO: 2357 - protein, 14 aa, Aspergillus fumigatus
WCHLPGQGCAKAKR

SEQ ID NO: 2358 - protein, 14 aa, Aspergillus fumigatus
WCHLPGQGCYMLKR

SEQ ID NO: 2359 - protein, 14 aa, Aspergillus heteromorphus
WCVLPGQPCHKMKR

SEQ ID NO: 2360 - protein, 14 aa, Aspergillus heteromorphus
WCVLPGQPCNKIKR

SEQ ID NO: 2361 - protein, 14 aa, Aspergillus heteromorphus
WCYLPGQPCAMMKR

SEQ ID NO: 2362 - protein, 14 aa, Aspergillus heteromorphus
WCYLPGQPCQKIKR

SEQ ID NO: 2363 - protein, 14 aa, Aspergillus ibericus
WCYLPGQPCTKIKR

SEQ ID NO: 2364 - protein, 14 aa, Aspergillus ibericus
WCYLPGQPCTMIKR

SEQ ID NO: 2365 - protein, 14 aa, Aspergillus indologenus
WCYLPGQPCAMMKR

SEQ ID NO: 2366 - protein, 14 aa, Aspergillus indologenus
WCYLPGQPCQKIKR

SEQ ID NO: 2367 - protein, 14 aa, Aspergillus japonicus
WCYLPGQPCAMMKR

SEQ ID NO: 2368 - protein, 14 aa, Aspergillus japonicus
WCYLPGQPCQKIKR

SEQ ID NO: 2369 - protein, 14 aa, Aspergillus lentulus
WCHLPGQGCAKAKR

SEQ ID NO: 2370 - protein, 14 aa, Aspergillus lentulus
WCHLPGQGCYMLKR

SEQ ID NO: 2371 - protein, 14 aa, Aspergillus lentulus
WCHLPGQGCAKAKR

SEQ ID NO: 2372 - protein, 14 aa, Aspergillus lentulus
WCHLPGQGCYMLKR

SEQ ID NO: 2373 - protein, 14 aa, Aspergillus lentulus
WCHLPGQGCAKAKR

SEQ ID NO: 2374 - protein, 14 aa, Aspergillus lentulus
WCHLPGQGCYMLKR

SEQ ID NO: 2375 - protein, 14 aa, Aspergillus lentulus
WCHLPGQGCAKAKR

SEQ ID NO: 2376 - protein, 14 aa, Aspergillus lentulus
WCHLPGQGCYMLKR

SEQ ID NO: 2377 - protein, 14 aa, Aspergillus lentulus
WCHLPGQGCAKAKR

SEQ ID NO: 2378 - protein, 14 aa, Aspergillus lentulus
WCHLPGQGCYMLKR

SEQ ID NO: 2379 - protein, 14 aa, Aspergillus lentulus
WCHLPGQGCAKAKR

SEQ ID NO: 2380 - protein, 14 aa, Aspergillus lentulus
WCHLPGQGCYMLKR

SEQ ID NO: 2381 - protein, 14 aa, Aspergillus lentulus
WCHLPGQGCAKAKR

SEQ ID NO: 2382 - protein, 14 aa, Aspergillus lentulus
WCHLPGQGCYMLKR

SEQ ID NO: 2383 - protein, 14 aa, Aspergillus lentulus
WCHLPGQGCAKAKR

SEQ ID NO: 2384 - protein, 14 aa, Aspergillus lentulus
WCHLPGQGCYMLKR

SEQ ID NO: 2385 - protein, 14 aa, Aspergillus lentulus
WCHLPGQGCAKAKR

SEQ ID NO: 2386 - protein, 14 aa, Aspergillus lentulus
WCHLPGQGCYMLKR

SEQ ID NO: 2387 - protein, 14 aa, Aspergillus lentulus
WCHLPGQGCAKAKR

SEQ ID NO: 2388 - protein, 14 aa, Aspergillus lentulus
WCHLPGQGCYMLKR

SEQ ID NO: 2389 - protein, 14 aa, Aspergillus lentulus
WCHLPGQGCAKAKR

SEQ ID NO: 2390 - protein, 14 aa, Aspergillus lentulus
WCHLPGQGCYMLKR

SEQ ID NO: 2391 - protein, 14 aa, Aspergillus lentulus
WCHLPGQGCAKAKR

SEQ ID NO: 2392 - protein, 14 aa, Aspergillus lentulus
WCHLPGQGCYMLKR

SEQ ID NO: 2393 - protein, 14 aa, Aspergillus luchuensis
WCHLPGQPCNMIKR

SEQ ID NO: 2394 - protein, 14 aa, Aspergillus luchuensis
WCVLPGQPCNKIKR

SEQ ID NO: 2395 - protein, 14 aa, Aspergillus luchuensis
WCHLPGQPCNMIKR

SEQ ID NO: 2396 - protein, 14 aa, Aspergillus luchuensis
WCVLPGQPCNKIKR

SEQ ID NO: 2397 - protein, 14 aa, Aspergillus luchuensis
WCHLPGQPCNMIKR

SEQ ID NO: 2398 - protein, 14 aa, Aspergillus luchuensis
WCVLPGQPCNKIKR

SEQ ID NO: 2399 - protein, 14 aa, Aspergillus mulundensis
WCRWPGQVCHKAKR

SEQ ID NO: 2400 - protein, 14 aa, Aspergillus mulundensis
WCRWPGQVCHKSKR

SEQ ID NO: 2401 - protein, 14 aa, Aspergillus neoniger
WCVLPGQPCNKIKR

SEQ ID NO: 2402 - protein, 14 aa, Aspergillus neoniger
WCYLPGQPCNMIKR

SEQ ID NO: 2403 - protein, 14 aa, Aspergillus niger
WCVLPGQPCNKIKR

SEQ ID NO: 2404 - protein, 14 aa, Aspergillus niger
WCVLPGQPCNMIKR

SEQ ID NO: 2405 - protein, 14 aa, Aspergillus niger
WCHLPGQPCNMIKR

SEQ ID NO: 2406 - protein, 14 aa, Aspergillus niger
WCVLPGQPCNKIKR

SEQ ID NO: 2407 - protein, 14 aa, Aspergillus niger
WCVLPGQPCNKIKR

SEQ ID NO: 2408 - protein, 14 aa, Aspergillus niger
WCVLPGQSCNMIKR

SEQ ID NO: 2409 - protein, 14 aa, Aspergillus niger
WCVLPGQPCNKIKR

SEQ ID NO: 2410 - protein, 14 aa, Aspergillus niger
WCVLPGQSCNMIKR

SEQ ID NO: 2411 - protein, 14 aa, Aspergillus niger
WCVLPGQPCNKIKR

SEQ ID NO: 2412 - protein, 14 aa, Aspergillus niger
WCVLPGQSCNMIKR

SEQ ID NO: 2413 - protein, 14 aa, Aspergillus niger
WCVLPGQPCNKIKR

SEQ ID NO: 2414 - protein, 14 aa, Aspergillus niger
WCVLPGQPCNMIKR

SEQ ID NO: 2415 - protein, 14 aa, Aspergillus niger
WCVLPGQPCNKIKR

SEQ ID NO: 2416 - protein, 14 aa, Aspergillus niger
WCVLPGQPCNMIKR

SEQ ID NO: 2417 - protein, 14 aa, Aspergillus nomiae
WCALPAQGCYMLKR

SEQ ID NO: 2418 - protein, 14 aa, Aspergillus nomiae
WCALPGQGCLKAKR

SEQ ID NO: 2419 - protein, 14 aa, Aspergillus novofumigatus
WCHLPGQGCAKAKR

SEQ ID NO: 2420 - protein, 14 aa, Aspergillus novofumigatus
WCHLPGQGCYMLKR

SEQ ID NO: 2421 - protein, 14 aa, Aspergillus phoenicis
WCVLPGQPCNKIKR

SEQ ID NO: 2422 - protein, 14 aa, Aspergillus phoenicis
WCVLPGQPCNMIKR

SEQ ID NO: 2423 - protein, 14 aa, Aspergillus piperis
WCHLPGQPCNMIKR

SEQ ID NO: 2424 - protein, 14 aa, Aspergillus piperis
WCVLPGQPCNKIKR

SEQ ID NO: 2425 - protein, 14 aa, Aspergillus saccharolyticus
WCYLPGQPCAMMKR

SEQ ID NO: 2426 - protein, 14 aa, Aspergillus saccharolyticus
WCYLPGQPCQKIKR

SEQ ID NO: 2427 - protein, 14 aa, Aspergillus sclerotialis
WCYLPGQGCNKMKR

SEQ ID NO: 2428 - protein, 14 aa, Aspergillus sclerotialis
WCYLPGQGCYMLKR

SEQ ID NO: 2429 - protein, 14 aa, Aspergillus sclerotiicarbonarius
WCYLPGQPCTKIKR

SEQ ID NO: 2430 - protein, 14 aa, Aspergillus sclerotiicarbonarius
WCYLPGQPCTMIKR

SEQ ID NO: 2431 - protein, 14 aa, Aspergillus taichungensis
WCHFPGQGCQKAKR

SEQ ID NO: 2432 - protein, 14 aa, Aspergillus taichungensis
WCHFPGQGCYMLKR

SEQ ID NO: 2433 - protein, 14 aa, Aspergillus terreus
WCWLPGQGCLKVKR

SEQ ID NO: 2434 - protein, 14 aa, Aspergillus terreus
WCWLPGQGCYMLKR

SEQ ID NO: 2435 - protein, 14 aa, Aspergillus terreus
WCWLPGQGCLKVKR

SEQ ID NO: 2436 - protein, 14 aa, Aspergillus terreus
WCWLPGQGCYMLKR

SEQ ID NO: 2437 - protein, 14 aa, Aspergillus thermomutatus
WCHLPGQGCAKAKR

SEQ ID NO: 2438 - protein, 14 aa, Aspergillus thermomutatus
WCQLPGQGCYMLKR

SEQ ID NO: 2439 - protein, 14 aa, Aspergillus tubingensis
WCHLPGQPCNMIKR

SEQ ID NO: 2440 - protein, 14 aa, Aspergillus tubingensis
WCVLPGQPCNKIKR

SEQ ID NO: 2441 - protein, 14 aa, Aspergillus tubingensis
WCHLPGQPCNMIKR

SEQ ID NO: 2442 - protein, 14 aa, Aspergillus tubingensis
WCVLPGQPCNKIKR

SEQ ID NO: 2443 - protein, 14 aa, Aspergillus turcosus
WCHLPGQGCAKAKR

SEQ ID NO: 2444 - protein, 14 aa, Aspergillus turcosus
WCHLPGQGCYMLKR

SEQ ID NO: 2445 - protein, 14 aa, Aspergillus turcosus
WCHLPGQGCAKAKR

SEQ ID NO: 2446 - protein, 14 aa, Aspergillus turcosus
WCHLPGQGCYMLKR

SEQ ID NO: 2447 - protein, 14 aa, Aspergillus udagawae
WCHLPGQGCAKAKR

SEQ ID NO: 2448 - protein, 14 aa, Aspergillus udagawae
WCHLPGQGCYMLKR

SEQ ID NO: 2449 - protein, 14 aa, Aspergillus udagawae
WCHLPGQGCAKAKR

SEQ ID NO: 2450 - protein, 14 aa, Aspergillus udagawae
WCHLPGQGCYKLKR

SEQ ID NO: 2451 - protein, 14 aa, Aspergillus udagawae
WCHLPGQGCAKAKR

SEQ ID NO: 2452 - protein, 14 aa, Aspergillus udagawae
WCHLPGQGCYMLKR

SEQ ID NO: 2453 - protein, 14 aa, Aspergillus udagawae
WCHLPGQGCAKAKR

SEQ ID NO: 2454 - protein, 14 aa, Aspergillus udagawae
WCHLPGQGCYKLKR

SEQ ID NO: 2455 - protein, 14 aa, Aspergillus udagawae
WCHLPGQGCAKAKR

SEQ ID NO: 2456 - protein, 14 aa, Aspergillus udagawae
WCHLPGQGCYKLKR

SEQ ID NO: 2457 - protein, 14 aa, Aspergillus uvarum
WCYLPGQPCAMMKR

SEQ ID NO: 2458 - protein, 14 aa, Aspergillus uvarum
WCYLPGQPCQKIKR

SEQ ID NO: 2459 - protein, 14 aa, Aspergillus vadensis
WCHLPGQPCNMIKR

SEQ ID NO: 2460 - protein, 14 aa, Aspergillus vadensis
WCVLPGQPCNKIKR

SEQ ID NO: 2461 - protein, 14 aa, Aspergillus violaceofuscus
WCYLPGQPCAMMKR

SEQ ID NO: 2462 - protein, 14 aa, Aspergillus violaceofuscus
WCYLPGQPCQKIKR

SEQ ID NO: 2463 - protein, 14 aa, Aspergillus welwitschiae
WCVLPGQPCNKIKR

SEQ ID NO: 2464 - protein, 14 aa, Aspergillus welwitschiae
WCVLPGQPCNMIKR

SEQ ID NO: 2465 - protein, 14 aa, Aulographum hederae
FCHLPGQVCGKAKR

SEQ ID NO: 2466 - protein, 14 aa, Aulographum hederae
FCHLPGQVCGKARR

SEQ ID NO: 2467 - protein, 14 aa, Aulographum hederae
FCHLPGQVCGKLKR

SEQ ID NO: 2468 - protein, 14 aa, Aulographum hederae
FCHLPGQVCGKVKR

SEQ ID NO: 2469 - protein, 13 aa, Aulographum hederae
FCHLPGRVCGKKR

SEQ ID NO: 2470 - protein, 14 aa, Beauveria bassiana
WCMRPGQPCWKAKR

SEQ ID NO: 2471 - protein, 14 aa, Beauveria bassiana
WCMRPGQPCWKLKR

SEQ ID NO: 2472 - protein, 12 aa, Beauveria bassiana
WCMRPGQPCWKR

SEQ ID NO: 2473 - protein, 14 aa, Beauveria bassiana
WCMRPGQPCWKAKR

SEQ ID NO: 2474 - protein, 14 aa, Beauveria bassiana
WCMRPGQPCWKLKR

SEQ ID NO: 2475 - protein, 12 aa, Beauveria bassiana
WCMRPGQPCWKR

SEQ ID NO: 2476 - protein, 14 aa, Beauveria bassiana
WCMRPGQPCWKAKR

SEQ ID NO: 2477 - protein, 14 aa, Beauveria bassiana
WCMRPGQPCWKLKR

SEQ ID NO: 2478 - protein, 12 aa, Beauveria bassiana
WCMRPGQPCWKR

SEQ ID NO: 2479 - protein, 14 aa, Beauveria bassiana
WCMRPGQPCWKAKR

SEQ ID NO: 2480 - protein, 14 aa, Beauveria bassiana
WCMRPGQPCWKLKR

SEQ ID NO: 2481 - protein, 12 aa, Beauveria bassiana
WCMRPGQPCWKR

SEQ ID NO: 2482 - protein, 14 aa, Beauveria brongniartii
WCLRPGEPCWKAKR

SEQ ID NO: 2483 - protein, 14 aa, Beauveria brongniartii
WCLRPGQPCWKLKR

SEQ ID NO: 2484 - protein, 11 aa, Beauveria brongniartii
WCMQNRKCWKR

SEQ ID NO: 2485 - protein, 14 aa, Botryosphaeria dothidea
FCHDEGQPCYRLKR

SEQ ID NO: 2486 - protein, 13 aa, Botryosphaeria dothidea
YCHFRGSACPKKR

SEQ ID NO: 2487 - protein, 13 aa, Botryosphaeria dothidea
YCRFRGSACPKKR

SEQ ID NO: 2488 - protein, 13 aa, Botryosphaeria dothidea
YCRFRGSVCPKKR

SEQ ID NO: 2489 - protein, 14 aa, Botryosphaeria dothidea
FCHDEGQPCYRLKR

SEQ ID NO: 2490 - protein, 13 aa, Botryosphaeria dothidea
YCHFRGSACPKKR

SEQ ID NO: 2491 - protein, 13 aa, Botryosphaeria dothidea
YCRFRGSACPKKR

SEQ ID NO: 2492 - protein, 13 aa, Botryosphaeria dothidea
YCRFRGSVCPKKR

SEQ ID NO: 2493 - protein, 13 aa, Botryotinia calthae
CNMVGGACFEAKR

SEQ ID NO: 2494 - protein, 11 aa, Botryotinia calthae
WCGRHGQPCKR

SEQ ID NO: 2495 - protein, 13 aa, Botryotinia calthae
WCGRPGQPCKEKR

SEQ ID NO: 2496 - protein, 11 aa, Botryotinia calthae
WCGRPGQPCKR

SEQ ID NO: 2497 - protein, 13 aa, Botryotinia calthae
WCGRPGQPCKREA

SEQ ID NO: 2498 - protein, 14 aa, Botryotinia calthae
WCGRPGQPCRAVKR

SEQ ID NO: 2499 - protein, 14 aa, Botryotinia calthae
WCGRPGQPCRKAKR

SEQ ID NO: 2500 - protein, 14 aa, Botryotinia calthae
WCGRPGQPCRKNKR

SEQ ID NO: 2501 - protein, 11 aa, Botryotinia calthae
WCRRPGQPCKR

SEQ ID NO: 2502 - protein, 13 aa, Botryotinia convoluta
CNMVGGACFEAKR

SEQ ID NO: 2503 - protein, 13 aa, Botryotinia convoluta
WCGRPGQPCKEKR

SEQ ID NO: 2504 - protein, 11 aa, Botryotinia convoluta
WCGRPGQPCKR

SEQ ID NO: 2505 - protein, 14 aa, Botryotinia convoluta
WCGRPGQPCRAVKR

SEQ ID NO: 2506 - protein, 14 aa, Botryotinia convoluta
WCGRPGQPCRKAKR

SEQ ID NO: 2507 - protein, 14 aa, Botryotinia convoluta
WCGRPGQPCRKNKR

SEQ ID NO: 2508 - protein, 13 aa, Botryotinia narcissicola
CNMVGGACFEAKR

SEQ ID NO: 2509 - protein, 13 aa, Botryotinia narcissicola
WCGRPGQPCKEKR

SEQ ID NO: 2510 - protein, 11 aa, Botryotinia narcissicola
WCGRPGQPCKR

SEQ ID NO: 2511 - protein, 14 aa, Botryotinia narcissicola
WCGRPGQPCRAVKR

SEQ ID NO: 2512 - protein, 14 aa, Botryotinia narcissicola
WCGRPGQPCRKAKR

SEQ ID NO: 2513 - protein, 14 aa, Botryotinia narcissicola
WCGRPGQPCRKNKR

SEQ ID NO: 2514 - protein, 13 aa, Botrytis cinerea
CNMVGGACFEAKR

SEQ ID NO: 2515 - protein, 13 aa, Botrytis cinerea
WCGRPGQPCKEKR

SEQ ID NO: 2516 - protein, 11 aa, Botrytis cinerea
WCGRPGQPCKR

SEQ ID NO: 2517 - protein, 13 aa, Botrytis cinerea
WCGRPGQPCKREA

SEQ ID NO: 2518 - protein, 12 aa, Botrytis cinerea
WCGRPGQPCKRT

SEQ ID NO: 2519 - protein, 14 aa, Botrytis cinerea
WCGRPGQPCRAVKR

SEQ ID NO: 2520 - protein, 14 aa, Botrytis cinerea
WCGRPGQPCRKAKR

SEQ ID NO: 2521 - protein, 14 aa, Botrytis cinerea
WCGRPGQPCRKNKR

SEQ ID NO: 2522 - protein, 13 aa, Botrytis cinerea
CNMVGGACFEAKR

SEQ ID NO: 2523 - protein, 13 aa, Botrytis cinerea
WCGRPGQPCKEKR

SEQ ID NO: 2524 - protein, 11 aa, Botrytis cinerea
WCGRPGQPCKR

SEQ ID NO: 2525 - protein, 13 aa, Botrytis cinerea
WCGRPGQPCKREA

SEQ ID NO: 2526 - protein, 12 aa, Botrytis cinerea
WCGRPGQPCKRT

SEQ ID NO: 2527 - protein, 14 aa, Botrytis cinerea
WCGRPGQPCRAVKR

SEQ ID NO: 2528 - protein, 14 aa, Botrytis cinerea
WCGRPGQPCRKAKR

SEQ ID NO: 2529 - protein, 14 aa, Botrytis cinerea
WCGRPGQPCRKNKR

SEQ ID NO: 2530 - protein, 13 aa, Botrytis cinerea
CNMVGGACFEAKR

SEQ ID NO: 2531 - protein, 13 aa, Botrytis cinerea
WCGRPGQPCKEKR

SEQ ID NO: 2532 - protein, 11 aa, Botrytis cinerea
WCGRPGQPCKR

SEQ ID NO: 2533 - protein, 13 aa, Botrytis cinerea
WCGRPGQPCKREA

SEQ ID NO: 2534 - protein, 12 aa, Botrytis cinerea
WCGRPGQPCKRT

SEQ ID NO: 2535 - protein, 14 aa, Botrytis cinerea
WCGRPGQPCRAVKR

SEQ ID NO: 2536 - protein, 14 aa, Botrytis cinerea
WCGRPGQPCRKAKR

SEQ ID NO: 2537 - protein, 14 aa, Botrytis cinerea
WCGRPGQPCRKNKR

SEQ ID NO: 2538 - protein, 13 aa, Botrytis elliptica
CNMVGGACFEAKR

SEQ ID NO: 2539 - protein, 14 aa, Botrytis elliptica
WCGLPGQPCRKAKR

SEQ ID NO: 2540 - protein, 11 aa, Botrytis elliptica
WCGRPGQPCKR

SEQ ID NO: 2541 - protein, 14 aa, Botrytis elliptica
WCGRPGQPCRAVKR

SEQ ID NO: 2542 - protein, 14 aa, Botrytis elliptica
WCGRPGQPCRKNKR

SEQ ID NO: 2543 - protein, 13 aa, Botrytis fragariae
CNMVGGACFEAKR

SEQ ID NO: 2544 - protein, 13 aa, Botrytis fragariae
WCGRPGQPCKEKR

SEQ ID NO: 2545 - protein, 11 aa, Botrytis fragariae
WCGRPGQPCKR

SEQ ID NO: 2546 - protein, 14 aa, Botrytis fragariae
WCGRPGQPCRAVKR

SEQ ID NO: 2547 - protein, 14 aa, Botrytis fragariae
WCGRPGQPCRKAKR

SEQ ID NO: 2548 - protein, 14 aa, Botrytis fragariae
WCGRPGQPCRKNKR

SEQ ID NO: 2549 - protein, 13 aa, Botrytis galanthina
CNMVGGACFEAKR

SEQ ID NO: 2550 - protein, 13 aa, Botrytis galanthina
WCGRPGQPCKEKR

SEQ ID NO: 2551 - protein, 11 aa, Botrytis galanthina
WCGRPGQPCKR

SEQ ID NO: 2552 - protein, 14 aa, Botrytis galanthina
WCGRPGQPCRAVKR

SEQ ID NO: 2553 - protein, 14 aa, Botrytis galanthina
WCGRPGQPCRKAKR

SEQ ID NO: 2554 - protein, 14 aa, Botrytis galanthina
WCGRPGQPCRKNKR

SEQ ID NO: 2555 - protein, 13 aa, Botrytis hyacinthi
CNMVGGACFEAKR

SEQ ID NO: 2556 - protein, 13 aa, Botrytis hyacinthi
WCGRPGQPCKEKR

SEQ ID NO: 2557 - protein, 11 aa, Botrytis hyacinthi
WCGRPGQPCKR

SEQ ID NO: 2558 - protein, 14 aa, Botrytis hyacinthi
WCGRPGQPCRKAKR

SEQ ID NO: 2559 - protein, 14 aa, Botrytis hyacinthi
WCGRPGQPCRKNKR

SEQ ID NO: 2560 - protein, 14 aa, Botrytis hyacinthi
WCGRPGQPCSAVKR

SEQ ID NO: 2561 - protein, 13 aa, Botrytis paeoniae
CNMVGGACFEAKR

SEQ ID NO: 2562 - protein, 13 aa, Botrytis paeoniae
WCGRPGQPCKEKR

SEQ ID NO: 2563 - protein, 11 aa, Botrytis paeoniae
WCGRPGQPCKR

SEQ ID NO: 2564 - protein, 14 aa, Botrytis paeoniae
WCGRPGQPCRAVKR

SEQ ID NO: 2565 - protein, 14 aa, Botrytis paeoniae
WCGRPGQPCRKAKR

SEQ ID NO: 2566 - protein, 14 aa, Botrytis paeoniae
WCGRPGQPCRKNKR

SEQ ID NO: 2567 - protein, 11 aa, Botrytis paeoniae
WCGRSGQPCKR

SEQ ID NO: 2568 - protein, 11 aa, Botrytis porri
WCGRPGQPCKR

SEQ ID NO: 2569 - protein, 14 aa, Botrytis porri
WCGRPGQPCRAVKR

SEQ ID NO: 2570 - protein, 14 aa, Botrytis porri
WCGRPGQPCRKAKR

SEQ ID NO: 2571 - protein, 13 aa, Botrytis tulipae
CNMVGGACFEAKR

SEQ ID NO: 2572 - protein, 13 aa, Botrytis tulipae
WCGRPGQPCKEKR

SEQ ID NO: 2573 - protein, 11 aa, Botrytis tulipae
WCGRPGQPCKR

SEQ ID NO: 2574 - protein, 14 aa, Botrytis tulipae
WCGRPGQPCRAVKR

SEQ ID NO: 2575 - protein, 14 aa, Botrytis tulipae
WCGRPGQPCRKAKR

SEQ ID NO: 2576 - protein, 14 aa, Botrytis tulipae
WCGRPGQPCRKNKR

SEQ ID NO: 2577 - protein, 13 aa, Cadophora sp.
  source 1..13: note = DSE1049
CGHPGQPCGKAKR

SEQ ID NO: 2578 - protein, 11 aa, Cadophora sp.
  source 1..11: note = DSE1049
CGHPGQPCGKR

SEQ ID NO: 2579 - protein, 11 aa, Cenococcum geophilum
AAPNAVTKLKR

SEQ ID NO: 2580 - protein, 13 aa, Cenococcum geophilum
CHLPGQSCGKIKR

SEQ ID NO: 2581 - protein, 14 aa, Cenococcum geophilum
GCHLPGQSCGKAKR

SEQ ID NO: 2582 - protein, 17 aa, Cenococcum geophilum
YIHGCHLPGQSCGKAKR

SEQ ID NO: 2583 - protein, 9 aa, Chaetomium thermophilum
CTGQSCWKR

SEQ ID NO: 2584 - protein, 14 aa, Chaetomium thermophilum
RCISEGGACWRAKR

SEQ ID NO: 2585 - protein, 13 aa, Chaetomium thermophilum
SCTRFVGESCWKR

SEQ ID NO: 2586 - protein, 14 aa, Chaetomium thermophilum
WCEMAGQACDTVKR

SEQ ID NO: 2587 - protein, 13 aa, Chaetomium thermophilum
WCKLFPGQPCWKR

SEQ ID NO: 2588 - protein, 13 aa, Chaetomium thermophilum
WCTRFPGQPCWKR

SEQ ID NO: 2589 - protein, 13 aa, Chalara longipes
  source 1..13: note = BDJ
CGARGQPCGKAKR

SEQ ID NO: 2590 - protein, 13 aa, Chalara longipes
  source 1..13: note = BDJ
CGARGQPCGKVKR

SEQ ID NO: 2591 - protein, 14 aa, Chlorociboria aeruginascens
CGRPGQGCKDKAKR

SEQ ID NO: 2592 - protein, 14 aa, Chlorociboria aeruginascens
CGRPGQGCKDKLKR

SEQ ID NO: 2593 - protein, 10 aa, Chlorociboria aeruginascens
CGRPGQGCKR

SEQ ID NO: 2594 - protein, 13 aa, Chlorociboria aeruginascens
CGRPGQGCRKAKR

SEQ ID NO: 2595 - protein, 13 aa, Chlorociboria aeruginascens
CGSEGQPCARVKR

SEQ ID NO: 2596 - protein, 13 aa, Chlorociboria aeruginascens
CNLVGGACYEAKR

SEQ ID NO: 2597 - protein, 14 aa, Claviceps purpurea
WCWRPGEGCWKAKR

SEQ ID NO: 2598 - protein, 14 aa, Claviceps purpurea
WCWRPGQGCWKVKR

SEQ ID NO: 2599 - protein, 10 aa, Coleophoma cylindrospora
CGRLGQPCKR

SEQ ID NO: 2600 - protein, 10 aa, Coleophoma cylindrospora
CGRMGQPCKR

SEQ ID NO: 2601 - protein, 12 aa, Colletotrichum aenigma
WCTKPGQPCWKR

SEQ ID NO: 2602 - protein, 12 aa, Colletotrichum asianum
WCTEPGQPCWKR

SEQ ID NO: 2603 - protein, 12 aa, Colletotrichum asianum
WCTKPDQPCWKR

SEQ ID NO: 2604 - protein, 12 aa, Colletotrichum asianum
WCTKPGQPCWKR

SEQ ID NO: 2605 - protein, 12 aa, Colletotrichum asianum
WCTQPGQPCWKR

SEQ ID NO: 2606 - protein, 12 aa, Colletotrichum fructicola
WCNKPGQPCWKR

SEQ ID NO: 2607 - protein, 12 aa, Colletotrichum fructicola
WCTKPGQPCWKR

SEQ ID NO: 2608 - protein, 12 aa, Colletotrichum fructicola
WCNKPGQPCWKR

SEQ ID NO: 2609 - protein, 12 aa, Colletotrichum fructicola
WCTKPGQPCWKR

SEQ ID NO: 2610 - protein, 12 aa, Colletotrichum fructicola
WCNKPGQPCWKR

SEQ ID NO: 2611 - protein, 12 aa, Colletotrichum fructicola
WCTKPGQPCWKR

SEQ ID NO: 2612 - protein, 12 aa, Colletotrichum fructicola
WCNKPGQPCWKR

SEQ ID NO: 2613 - protein, 12 aa, Colletotrichum fructicola
WCTKPGQPCWKR

SEQ ID NO: 2614 - protein, 12 aa, Colletotrichum fructicola
WCNKPGQPCWKR

SEQ ID NO: 2615 - protein, 12 aa, Colletotrichum fructicola
WCTKPGQPCWKR

SEQ ID NO: 2616 - protein, 12 aa, Colletotrichum fructicola
WCNKPGQPCWKR

SEQ ID NO: 2617 - protein, 12 aa, Colletotrichum fructicola
WCTKPGQPCWKR

SEQ ID NO: 2618 - protein, 12 aa, Colletotrichum fructicola
WCNKPGQPCWKR

SEQ ID NO: 2619 - protein, 12 aa, Colletotrichum fructicola
WCTKPGQPCWKR

SEQ ID NO: 2620 - protein, 12 aa, Colletotrichum gloeosporioides
WCTKPGQPCWKR

SEQ ID NO: 2621 - protein, 14 aa, Colletotrichum higginsianum
WCRSVGQPCWKVKR

SEQ ID NO: 2622 - protein, 14 aa, Colletotrichum higginsianum
WCSQPGAPCSVAKR

SEQ ID NO: 2623 - protein, 14 aa, Colletotrichum higginsianum
WCRSVGQPCWKVKR

SEQ ID NO: 2624 - protein, 14 aa, Colletotrichum higginsianum
WCSQPGAPCSVAKR

SEQ ID NO: 2625 - protein, 16 aa, Colletotrichum orchidophilum
RCQSIGQPCWKARVKR

SEQ ID NO: 2626 - protein, 14 aa, Colletotrichum orchidophilum
WCQNVGEPCWRVKR

SEQ ID NO: 2627 - protein, 13 aa, Colletotrichum orchidophilum
WCQSVGQSCWKDK

SEQ ID NO: 2628 - protein, 14 aa, Colletotrichum salicis
WCNRKLIGQPCWKR

SEQ ID NO: 2629 - protein, 14 aa, Colletotrichum salicis
WCQAVGQGCWKVKR

SEQ ID NO: 2630 - protein, 13 aa, Colletotrichum salicis
WCQDINQPCWKTK

SEQ ID NO: 2631 - protein, 14 aa, Colletotrichum shisoi
WCRSVGQPCWKVKR

SEQ ID NO: 2632 - protein, 14 aa, Colletotrichum shisoi
WCRTVGQPCWKAKR

SEQ ID NO: 2633 - protein, 14 aa, Colletotrichum shisoi
WCSQPGAPCSVAKR

SEQ ID NO: 2634 - protein, 12 aa, Colletotrichum siamense
WCTKPGQPCWKR

SEQ ID NO: 2635 - protein, 12 aa, Colletotrichum siamense
WCTKPGQPCWKR

SEQ ID NO: 2636 - protein, 12 aa, Colletotrichum siamense
WCTKPGQPCWKR

SEQ ID NO: 2637 - protein, 12 aa, Colletotrichum siamense
WCMKPGQPCWKR

SEQ ID NO: 2638 - protein, 12 aa, Colletotrichum siamense
WCTKPGQPCWKR

SEQ ID NO: 2639 - protein, 12 aa, Colletotrichum siamense
WCTKPGQPCWKR

SEQ ID NO: 2640 - protein, 13 aa, Colletotrichum tanaceti
WCRTVGQPCWKEK

SEQ ID NO: 2641 - protein, 14 aa, Colletotrichum tanaceti
WCRTVGQPCWKVKR

SEQ ID NO: 2642 - protein, 14 aa, Colletotrichum tanaceti
WCSQPGAPCSVAKR

SEQ ID NO: 2643 - protein, 12 aa, Colletotrichum tropicale
WCTKPGQPCWKR

SEQ ID NO: 2644 - protein, 12 aa, Colletotrichum viniferum
WCTEPGQPCWKR

SEQ ID NO: 2645 - protein, 12 aa, Colletotrichum viniferum
WCTKPGQPCWKR

SEQ ID NO: 2646 - protein, 14 aa, Coniella lustricola
WCLFHGEGCWKEKR

SEQ ID NO: 2647 - protein, 12 aa, Coniella lustricola
WCLFHGEGCWKR

SEQ ID NO: 2648 - protein, 14 aa, Coniella lustricola
WCLFHGEGCWKVKR

SEQ ID NO: 2649 - protein, 14 aa, Coniochaeta ligniaria
WCNIRGEPCWKSKR

SEQ ID NO: 2650 - protein, 8 aa, Coniochaeta pulveracea
SPCWKSKR

SEQ ID NO: 2651 - protein, 14 aa, Coniochaeta pulveracea
WCPFKGQPCWKSKR

SEQ ID NO: 2652 - protein, 14 aa, Coniochaeta pulveracea
WCPHKGQPCWKNKR

SEQ ID NO: 2653 - protein, 14 aa, Coniochaeta pulveracea
WCPHPGEPCWKSKR

SEQ ID NO: 2654 - protein, 14 aa, Coniochaeta pulveracea
WCPHPGQPCWKNKR

SEQ ID NO: 2655 - protein, 14 aa, Coniochaeta pulveracea
WCPHPGQPCWKSKR

SEQ ID NO: 2656 - protein, 14 aa, Coniochaeta pulveracea
WCPYKGQPCWKNKR

SEQ ID NO: 2657 - protein, 14 aa, Coniochaeta pulveracea
WCRLRGQPCWKSKR

SEQ ID NO: 2658 - protein, 14 aa, Coniochaeta sp.
  source 1..14: note = 2T2.1
CTTKGEPCWKKSKR

SEQ ID NO: 2659 - protein, 13 aa, Coniochaeta sp.
  source 1..13: note = 2T2.1
CTTKGEPCWKNKR

SEQ ID NO: 2660 - protein, 14 aa, Coniochaeta sp.
  source 1..14: note = 2T2.1
WCSVKGEPCWKNKR

SEQ ID NO: 2661 - protein, 14 aa, Coniochaeta sp.
  source 1..14: note = 2T2.1
WCSVKGEPCWKSKR

SEQ ID NO: 2662 - protein, 14 aa, Coniochaeta sp.
  source 1..14: note = 2T2.1
WCSVKGEPCWKSRR

SEQ ID NO: 2663 - protein, 13 aa, Coniochaeta sp.
  source 1..13: note = 2T2.1
CTTKVEPCWKNKR

SEQ ID NO: 2664 - protein, 14 aa, Coniochaeta sp.
  source 1..14: note = 2T2.1
WCSVKGEPCWKSKR

SEQ ID NO: 2665 - protein, 14 aa, Coniochaeta sp.
  source 1..14: note = 2T2.1
WCSVKGEPCYKHKR

SEQ ID NO: 2666 - protein, 14 aa, Coniochaeta sp.
  source 1..14: note = 2T2.1
WCSVKGEPCYKNKR

SEQ ID NO: 2667 - protein, 14 aa, Coniochaeta sp.
  source 1..14: note = 2T2.1
WCSVKGEPCYKSKR

SEQ ID NO: 2668 - protein, 13 aa, Coniosporium apollinis
CGAPNKPCHKAKR

SEQ ID NO: 2669 - protein, 14 aa, Coniosporium apollinis
ICWQPNQACDKLKR

SEQ ID NO: 2670 - protein, 18 aa, Coniosporium apollinis
WGSRFCHKTGQGCPRLKR

SEQ ID NO: 2671 - protein, 18 aa, Coniosporium apollinis
WGSRFCHKTGQGCPRVKR

SEQ ID NO: 2672 - protein, 13 aa, Cordyceps fumosorosea
CFRPAQPCWKLKR

SEQ ID NO: 2673 - protein, 14 aa, Cordyceps fumosorosea
WCFRPAQPCWKAKR

SEQ ID NO: 2674 - protein, 12 aa, Cordyceps fumosorosea
WCFRPAQPCWKR

SEQ ID NO: 2675 - protein, 14 aa, Cordyceps militaris
WCLRPGQPCWKAKR

SEQ ID NO: 2676 - protein, 12 aa, Cordyceps militaris
WCTRPGEPCWKR

SEQ ID NO: 2677 - protein, 14 aa, Cordyceps militaris
WCTRPGQPCWKLKR

SEQ ID NO: 2678 - protein, 14 aa, Cordyceps militaris
FCHLPGQGCSKAKR

SEQ ID NO: 2679 - protein, 14 aa, Cordyceps militaris
FCHLPGQGCSKVKR

SEQ ID NO: 2680 - protein, 15 aa, Cryphonectria parasitica
FCPFEGSSTCYASKR

SEQ ID NO: 2681 - protein, 14 aa, Cryphonectria parasitica
WCLFHGEGCWKEKR

SEQ ID NO: 2682 - protein, 12 aa, Cryphonectria parasitica
WCLFHGEGCWKR

SEQ ID NO: 2683 - protein, 14 aa, Cryphonectria parasitica
WCLFHGEGCWKVKR

SEQ ID NO: 2684 - protein, 14 aa, Cytospora leucostoma
SCEQPGEACFKARR

SEQ ID NO: 2685 - protein, 12 aa, Cytospora leucostoma
WCLLKGQGCWKR

SEQ ID NO: 2686 - protein, 13 aa, Delitschia confertaspora
CTFGHATCQKLKR

SEQ ID NO: 2687 - protein, 14 aa, Delitschia confertaspora
NCRFPGQSCSKAKR

SEQ ID NO: 2688 - protein, 14 aa, Delitschia confertaspora
NCRFPGQSCSKEKR

SEQ ID NO: 2689 - protein, 13 aa, Diaporthe ampelina
CEQPGEACHKARS

SEQ ID NO: 2690 - protein, 17 aa, Diaporthe ampelina
FCPFGGEAGSVCYASKR

SEQ ID NO: 2691 - protein, 14 aa, Diaporthe ampelina
WCFWKGQGCWKAKR

SEQ ID NO: 2692 - protein, 12 aa, Diaporthe ampelina
WCFWKGQGCWKR

SEQ ID NO: 2693 - protein, 12 aa, Diaporthe helianthi
CEEPGEACNKAR

SEQ ID NO: 2694 - protein, 17 aa, Diaporthe helianthi
FCPFGGEAGSVCYASKR

SEQ ID NO: 2695 - protein, 14 aa, Diaporthe helianthi
WCFWKGEGCWKAKR

SEQ ID NO: 2696 - protein, 12 aa, Diaporthe helianthi
WCFWKGEGCWKR

SEQ ID NO: 2697 - protein, 13 aa, Diplocarpon rosae
CGHPGQPCGKAKR

SEQ ID NO: 2698 - protein, 13 aa, Diplocarpon rosae
CGHPGQPCGKVKR

SEQ ID NO: 2699 - protein, 20 aa, Diplocarpon rosae
WTTLDARCNLVGGACYEAKR

SEQ ID NO: 2700 - protein, 13 aa, Diplocarpon rosae
CGHPGQPCGKAKR

SEQ ID NO: 2701 - protein, 13 aa, Diplodia corticola
CSGPADLCTMAKR

SEQ ID NO: 2702 - protein, 14 aa, Diplodia corticola
FCGRIRGQPCHKKR

SEQ ID NO: 2703 - protein, 15 aa, Diplodia corticola
FCGRIRGQPCHKLKR

SEQ ID NO: 2704 - protein, 11 aa, Dothistroma septosporum
CTAPGIACAKR

SEQ ID NO: 2705 - protein, 11 aa, Dothistroma septosporum
CTAPGIACGKR

SEQ ID NO: 2706 - protein, 11 aa, Dothistroma septosporum
CTVPGLACGKR

SEQ ID NO: 2707 - protein, 14 aa, Dothistroma septosporum
FCGLPGEACSRAKR

SEQ ID NO: 2708 - protein, 12 aa, Dothistroma septosporum
RCSAPGIGCEKR

SEQ ID NO: 2709 - protein, 12 aa, Dothistroma septosporum
RCTVPGLACGKR

SEQ ID NO: 2710 - protein, 14 aa, Drechmeria coniospora
WCTRPGSGCWKAKR

SEQ ID NO: 2711 - protein, 13 aa, Drechmeria coniospora
WCTRPGSGCWKKR

SEQ ID NO: 2712 - protein, 14 aa, Drechmeria coniospora
WCTRPGSGCWKVKR

SEQ ID NO: 2713 - protein, 14 aa, Drechmeria coniospora
WCTRPGSGCWKAKR

SEQ ID NO: 2714 - protein, 13 aa, Drechmeria coniospora
WCTRPGSGCWKKR

SEQ ID NO: 2715 - protein, 14 aa, Drechmeria coniospora
WCTRPGSGCWKVKR

SEQ ID NO: 2716 - protein, 13 aa, Drepanopeziza brunnea
CGYRGQPCPKAKR

SEQ ID NO: 2717 - protein, 9 aa, Escovopsis weberi
WAVAYKSKR

SEQ ID NO: 2718 - protein, 14 aa, Escovopsis weberi
WCIYPGQGCWKAKR

SEQ ID NO: 2719 - protein, 14 aa, Escovopsis weberi
WCMNPGQGCWKVKR

SEQ ID NO: 2720 - protein, 14 aa, Escovopsis weberi
WCTNPGQGCWKAKR

SEQ ID NO: 2721 - protein, 14 aa, Escovopsis weberi
WCTNPGQGCWKKKR

SEQ ID NO: 2722 - protein, 12 aa, Escovopsis weberi
WCTNPGQGCWKR

SEQ ID NO: 2723 - protein, 12 aa, Escovopsis weberi
WHFPTGCWKTKR

SEQ ID NO: 2724 - protein, 11 aa, Gaeumannomyces tritici
CQYRGQSCWKR

SEQ ID NO: 2725 - protein, 14 aa, Gaeumannomyces tritici
CTYRGQPCWKKTKR

SEQ ID NO: 2726 - protein, 14 aa, Gaeumannomyces tritici
FCGAEGQGCWQVKR

SEQ ID NO: 2727 - protein, 12 aa, Gaeumannomyces tritici
GCRFRGQSCWKR

SEQ ID NO: 2728 - protein, 12 aa, Gaeumannomyces tritici
GCRHRGQSCWKR

SEQ ID NO: 2729 - protein, 12 aa, Gaeumannomyces tritici
GCRNRGQSCWKR

SEQ ID NO: 2730 - protein, 12 aa, Gaeumannomyces tritici
GCRYRGQSCWKR

SEQ ID NO: 2731 - protein, 14 aa, Gaeumannomyces tritici
WCHEAGNACAVAKR

SEQ ID NO: 2732 - protein, 13 aa, Glarea lozoyensis
CIRHGQPCWKVKR

SEQ ID NO: 2733 - protein, 13 aa, Glarea lozoyensis
CQRHGQPCWKEKR

SEQ ID NO: 2734 - protein, 14 aa, Glarea lozoyensis
QCQRHGQPCWKVKR

SEQ ID NO: 2735 - protein, 13 aa, Glarea lozoyensis
CIRHGQPCWKVKR

SEQ ID NO: 2736 - protein, 13 aa, Glarea lozoyensis
CQRHGQPCWKEKR

SEQ ID NO: 2737 - protein, 14 aa, Glarea lozoyensis
QCQRHGQPCWKVKR

SEQ ID NO: 2738 - protein, 11 aa, Glonium stellatum
AEPNAVTKLKR

SEQ ID NO: 2739 - protein, 13 aa, Glonium stellatum
CHLPGQSCPKDKR

SEQ ID NO: 2740 - protein, 14 aa, Grosmannia clavigera
WCQWYGQACWKVKR

SEQ ID NO: 2741 - protein, 12 aa, Grosmannia clavigera
WCQWYGQGCWKR

SEQ ID NO: 2742 - protein, 13 aa, Helotiales sp.
  source 1..13: note = DMI-Dod-QoI
CGYPGQPCGKAKR

SEQ ID NO: 2743 - protein, 13 aa, Helotiales sp.
  source 1..13: note = DMI-Dod-QoI
CGYPGQPCGKLKR

SEQ ID NO: 2744 - protein, 13 aa, Helotiales sp.
  source 1..13: note = DMI-Dod-QoI
CGYPGQPCGKVKR

SEQ ID NO: 2745 - protein, 13 aa, Hyaloscypha bicolor
  source 1..13: note = E
CGARGQPCGKAKR

SEQ ID NO: 2746 - protein, 13 aa, Hyaloscypha bicolor
  source 1..13: note = E
CGARGQPCGKVKR

SEQ ID NO: 2747 - protein, 19 aa, Hyaloscypha hepaticicola
WDNDWGCGERGQPCGKVKR

SEQ ID NO: 2748 - protein, 17 aa, Hyaloscypha hepaticicola
WDWGCGERGQPCGKAKR

SEQ ID NO: 2749 - protein, 15 aa, Hyaloscypha hepaticicola
WGWGERGQPCGKAKR

SEQ ID NO: 2750 - protein, 13 aa, Lachnellula hyalina
CGARGQGCWKEKR

SEQ ID NO: 2751 - protein, 13 aa, Lachnellula hyalina
CGARGQGCWKIKR

SEQ ID NO: 2752 - protein, 13 aa, Lachnellula hyalina
CGARGQGCWKQKR

SEQ ID NO: 2753 - protein, 13 aa, Lachnellula hyalina
CGARGQGCWKVKR

SEQ ID NO: 2754 - protein, 14 aa, Lachnellula hyalina
GCGARGQGCWKIKR

SEQ ID NO: 2755 - protein, 12 aa, Lachnellula occidentalis
CGARGQGCPKKR

SEQ ID NO: 2756 - protein, 13 aa, Lachnellula occidentalis
CGARGQGCWKEKR

SEQ ID NO: 2757 - protein, 13 aa, Lachnellula occidentalis
CGARGQGCWKVKR

SEQ ID NO: 2758 - protein, 13 aa, Lachnellula subtilissima
CGARGQGCWKEKR

SEQ ID NO: 2759 - protein, 13 aa, Lachnellula subtilissima
CGARGQGCWKIKR

SEQ ID NO: 2760 - protein, 13 aa, Lachnellula subtilissima
CGARGQGCWKVKR

SEQ ID NO: 2761 - protein, 6 aa, Lachnellula subtilissima
CWKIKR

SEQ ID NO: 2762 - protein, 13 aa, Lachnellula suecica
CGARGQGCYKAKR

SEQ ID NO: 2763 - protein, 13 aa, Lachnellula suecica
CGARGQGCYKEKR

SEQ ID NO: 2764 - protein, 13 aa, Lachnellula suecica
CGARGQGCYKNKR

SEQ ID NO: 2765 - protein, 14 aa, Lachnellula suecica
GCGARGQGCYKIKR

SEQ ID NO: 2766 - protein, 13 aa, Lachnellula willkommii
CGARGQGCWKEKR

SEQ ID NO: 2767 - protein, 13 aa, Lachnellula willkommii
CGARGQGCWKIKR

SEQ ID NO: 2768 - protein, 13 aa, Lachnellula willkommii
CGARGQGCWKVKR

SEQ ID NO: 2769 - protein, 14 aa, Lachnellula willkommii
GCGARGQGCWKIKR

SEQ ID NO: 2770 - protein, 14 aa, Lasallia pustulata
FCYRPGEICSKAKR

SEQ ID NO: 2771 - protein, 14 aa, Lasallia pustulata
FCYRPGEICSKLKR

SEQ ID NO: 2772 - protein, 14 aa, Lasallia pustulata
FCYRPGEICSKTKR

SEQ ID NO: 2773 - protein, 14 aa, Lasallia pustulata
FCYRPGEICSKAKR

SEQ ID NO: 2774 - protein, 14 aa, Lasallia pustulata
FCYRPGEICSKLKR

SEQ ID NO: 2775 - protein, 14 aa, Lasallia pustulata
FCYRPGEICSKTKR

SEQ ID NO: 2776 - protein, 14 aa, Lasallia pustulata
FCYRRGEICSKAKR

SEQ ID NO: 2777 - protein, 13 aa, Lasiodiplodia theobromae
CSGPADLCTMAKR

SEQ ID NO: 2778 - protein, 14 aa, Lasiodiplodia theobromae
FCGRIRGQPCHKKR

SEQ ID NO: 2779 - protein, 15 aa, Lasiodiplodia theobromae
FCGRIRGQPCHKLKR

SEQ ID NO: 2780 - protein, 13 aa, Lasiodiplodia theobromae
CSGPADLCTMAKR

SEQ ID NO: 2781 - protein, 14 aa, Lasiodiplodia theobromae
FCGRIRGQPCHKKR

SEQ ID NO: 2782 - protein, 15 aa, Lasiodiplodia theobromae
FCGRIRGQPCHKLKR

SEQ ID NO: 2783 - protein, 13 aa, Letharia columbiana
CHAPGAPCSKAKR

SEQ ID NO: 2784 - protein, 14 aa, Letharia columbiana
FCWEAGEPCSKLKR

SEQ ID NO: 2785 - protein, 14 aa, Letharia columbiana
FCYLAGEPCSKAKR

SEQ ID NO: 2786 - protein, 17 aa, Letharia columbiana
WHGHCYRDDQPCSKLKR

SEQ ID NO: 2787 - protein, 17 aa, Letharia columbiana
WHGSCWPAGEPCSKQKR

SEQ ID NO: 2788 - protein, 13 aa, Lindgomyces ingoldianus
CAFGDEICEKIKR

SEQ ID NO: 2789 - protein, 13 aa, Lindgomyces ingoldianus
CRLVGQPCSKAKR

SEQ ID NO: 2790 - protein, 13 aa, Lindgomyces ingoldianus
CRLVGQPCSKQKR

SEQ ID NO: 2791 - protein, 11 aa, Lindgomyces ingoldianus
CRLVGQPCSKR

SEQ ID NO: 2792 - protein, 12 aa, Lindgomyces ingoldianus
RCRLVGQPCSKR

SEQ ID NO: 2793 - protein, 14 aa, Lindgomyces ingoldianus
SCGMPGQPCDRLKR

SEQ ID NO: 2794 - protein, 14 aa, Lineolata rhizophorae
FCHLPGQSCSKAKR

SEQ ID NO: 2795 - protein, 14 aa, Lineolata rhizophorae
FCHLPGQSCSKEKR

SEQ ID NO: 2796 - protein, 14 aa, Lineolata rhizophorae
FCHLPGQSCSKTRR

SEQ ID NO: 2797 - protein, 14 aa, Lineolata rhizophorae
FCHLPGQSCSKVKR

SEQ ID NO: 2798 - protein, 15 aa, Lineolata rhizophorae
YCHLPGQSCSEKEKR

SEQ ID NO: 2799 - protein, 14 aa, Lophiostoma macrostomum
FCHYRGQPCGKAKR

SEQ ID NO: 2800 - protein, 13 aa, Lophiotrema nucula
CGMPGQPCDRLKR

SEQ ID NO: 2801 - protein, 13 aa, Lophiotrema nucula
CLFVGQSCSVAKR

SEQ ID NO: 2802 - protein, 13 aa, Lophiotrema nucula
CQFSDATCQKIKR

SEQ ID NO: 2803 - protein, 13 aa, Lophiotrema nucula
CRFPGQPCSKEKR

SEQ ID NO: 2804 - protein, 12 aa, Lophiotrema nucula
CRFPGQPCSKKR

SEQ ID NO: 2805 - protein, 13 aa, Lophium mytilinum
CHLPGQSCSKDKR

SEQ ID NO: 2806 - protein, 13 aa, Lophium mytilinum
CHLPGQSCSKEKR

SEQ ID NO: 2807 - protein, 13 aa, Lophium mytilinum
CHLPGQSCSKTKR

SEQ ID NO: 2808 - protein, 15 aa, Lophium mytilinum
WGCHLPGQSCSKDKR

SEQ ID NO: 2809 - protein, 13 aa, Madurella mycetomatis
MCLRYPGSPCWKR

SEQ ID NO: 2810 - protein, 14 aa, Madurella mycetomatis
RCVAEGGSCWIAKR

SEQ ID NO: 2811 - protein, 13 aa, Madurella mycetomatis
WCLGFPGQPCWKR

SEQ ID NO: 2812 - protein, 13 aa, Madurella mycetomatis
WCLRFPGQPCWKR

SEQ ID NO: 2813 - protein, 14 aa, Madurella mycetomatis
WCSNRGQACDTVKR

SEQ ID NO: 2814 - protein, 17 aa, Madurella mycetomatis
WCTGFPGFPGQPCWKKR

SEQ ID NO: 2815 - protein, 15 aa, Madurella mycetomatis
WCTGFPGQPCWKEKR

SEQ ID NO: 2816 - protein, 14 aa, Madurella mycetomatis
WCTGFPGQPCWKKR

SEQ ID NO: 2817 - protein, 15 aa, Madurella mycetomatis
WCTGFPGQPCWKLKR

SEQ ID NO: 2818 - protein, 13 aa, Madurella mycetomatis
WCTGFPGQPCWKR

SEQ ID NO: 2819 - protein, 13 aa, Marssonina coronariae
CGKPGQPCGKAKR

SEQ ID NO: 2820 - protein, 13 aa, Marssonina coronariae
CGKPGQPCGKVKR

SEQ ID NO: 2821 - protein, 20 aa, Marssonina coronariae
WATLDARCNLVGGACYEAKR

SEQ ID NO: 2822 - protein, 9 aa, Massarina eburnea
KCRFVGQPC

SEQ ID NO: 2823 - protein, 12 aa, Massarina eburnea
KCRFVGQPCKRD

SEQ ID NO: 2824 - protein, 12 aa, Massarina eburnea
TCRFVGQPCKRD

SEQ ID NO: 2825 - protein, 13 aa, Melanomma pulvis-pyrius
CRFPGQPCSKEKR

SEQ ID NO: 2826 - protein, 12 aa, Melanomma pulvis-pyrius
CRFPGQPCSKKR

SEQ ID NO: 2827 - protein, 13 aa, Melanomma pulvis-pyrius
CRFPGQPCSKNKR

SEQ ID NO: 2828 - protein, 11 aa, Melanomma pulvis-pyrius
CRFPGQPCSKR

SEQ ID NO: 2829 - protein, 14 aa, Metarhizium acridum
VCNGPNILCWKKKR

SEQ ID NO: 2830 - protein, 12 aa, Metarhizium acridum
WCWQPGQPCWKR

SEQ ID NO: 2831 - protein, 14 aa, Metarhizium acridum
WCWQPGQPCWKVKR

SEQ ID NO: 2832 - protein, 14 aa, Metarhizium acridum
WCWRPGQPCWKAKR

SEQ ID NO: 2833 - protein, 14 aa, Metarhizium acridum
WCYRPGQPCWKAKR

SEQ ID NO: 2834 - protein, 14 aa, Metarhizium album
WCNRPGEPCWKAKR

SEQ ID NO: 2835 - protein, 14 aa, Metarhizium album
WCWRPGEPCWKAKR

SEQ ID NO: 2836 - protein, 14 aa, Metarhizium album
WCWRPGEPCWKVKR

SEQ ID NO: 2837 - protein, 14 aa, Metarhizium album
WCWRPGMPCWKRDS

SEQ ID NO: 2838 - protein, 14 aa, Metarhizium anisopliae
WCGRPGQPCWKAKR

SEQ ID NO: 2839 - protein, 14 aa, Metarhizium anisopliae
WCSAPGEPCWKDKR

SEQ ID NO: 2840 - protein, 14 aa, Metarhizium anisopliae
WCWRPGQPCWKAKR

SEQ ID NO: 2841 - protein, 14 aa, Metarhizium anisopliae
WCWRPGQPCWKVKR

SEQ ID NO: 2842 - protein, 14 aa, Metarhizium anisopliae
WCSAPGQPCWKAKR

SEQ ID NO: 2843 - protein, 14 aa, Metarhizium anisopliae
WCWAPGQPCWKAKR

SEQ ID NO: 2844 - protein, 14 aa, Metarhizium anisopliae
WCWQPGQPCWKDKR

SEQ ID NO: 2845 - protein, 14 aa, Metarhizium anisopliae
WCWRPGQPCWKVKR

SEQ ID NO: 2846 - protein, 14 aa, Metarhizium anisopliae
WCSAPGQPCWKAKR

SEQ ID NO: 2847 - protein, 14 aa, Metarhizium anisopliae
WCWAPGQPCWKAKR

SEQ ID NO: 2848 - protein, 14 aa, Metarhizium anisopliae
WCWQPGQPCWKDKR

SEQ ID NO: 2849 - protein, 14 aa, Metarhizium anisopliae
WCWRPGQPCWKVKR

SEQ ID NO: 2850 - protein, 14 aa, Metarhizium anisopliae
WCGAPGEPCWKAKR

SEQ ID NO: 2851 - protein, 14 aa, Metarhizium anisopliae
WCGGPGEPCWKDKR

SEQ ID NO: 2852 - protein, 14 aa, Metarhizium anisopliae
WCGSPGEPCWKDKR

SEQ ID NO: 2853 - protein, 14 aa, Metarhizium anisopliae
WCWAPGQPCWKAKR

SEQ ID NO: 2854 - protein, 14 aa, Metarhizium anisopliae
WCWRPGQPCWKVKR

SEQ ID NO: 2855 - protein, 14 aa, Metarhizium anisopliae
WCGAPGEPCWKAKR

SEQ ID NO: 2856 - protein, 14 aa, Metarhizium anisopliae
WCGGPGEPCWKDKR

SEQ ID NO: 2857 - protein, 14 aa, Metarhizium anisopliae
WCGSPGEPCWKDKR

SEQ ID NO: 2858 - protein, 14 aa, Metarhizium anisopliae
WCWAPGQPCWKAKR

SEQ ID NO: 2859 - protein, 14 aa, Metarhizium anisopliae
WCWRPGQPCWKVKR

SEQ ID NO: 2860 - protein, 14 aa, Metarhizium brunneum
WCGRPGQPCWKAKR

SEQ ID NO: 2861 - protein, 14 aa, Metarhizium brunneum
WCSAPGEPCWKDKR

SEQ ID NO: 2862 - protein, 14 aa, Metarhizium brunneum
WCSSPGEPCWKDKR

SEQ ID NO: 2863 - protein, 14 aa, Metarhizium brunneum
WCWRPGQPCWKAKR

SEQ ID NO: 2864 - protein, 14 aa, Metarhizium brunneum
WCWRPGQPCWKVKR

SEQ ID NO: 2865 - protein, 14 aa, Metarhizium brunneum
WCGRPGQPCWKAKR

SEQ ID NO: 2866 - protein, 14 aa, Metarhizium brunneum
WCSAPGEPCWKDKR

SEQ ID NO: 2867 - protein, 14 aa, Metarhizium brunneum
WCSSPGEPCWKDKR

SEQ ID NO: 2868 - protein, 14 aa, Metarhizium brunneum
WCWRPGQPCWKAKR

SEQ ID NO: 2869 - protein, 14 aa, Metarhizium brunneum
WCWRPGQPCWKVKR

SEQ ID NO: 2870 - protein, 14 aa, Metarhizium guizhouense
WCGAPGQPCWKAKR

SEQ ID NO: 2871 - protein, 14 aa, Metarhizium guizhouense
WCWQPGQPCWKDKR

SEQ ID NO: 2872 - protein, 14 aa, Metarhizium guizhouense
WCWRPGQPCWKAKR

SEQ ID NO: 2873 - protein, 14 aa, Metarhizium guizhouense
WCWRPGQPCWKVKR

SEQ ID NO: 2874 - protein, 14 aa, Metarhizium majus
WCWQPGQPCWKDKR

SEQ ID NO: 2875 - protein, 14 aa, Metarhizium majus
WCWRPGQPCWKAKR

SEQ ID NO: 2876 - protein, 14 aa, Metarhizium majus
WCWRPGQPCWKVKR

SEQ ID NO: 2877 - protein, 14 aa, Metarhizium rileyi
WCQRPGHDCWKAKR

SEQ ID NO: 2878 - protein, 14 aa, Metarhizium rileyi
WCWRPGQPCWKAKR

SEQ ID NO: 2879 - protein, 12 aa, Metarhizium rileyi
WCWRPGQPCWKR

SEQ ID NO: 2880 - protein, 14 aa, Metarhizium rileyi
WCWRPGQPCWKVKR

SEQ ID NO: 2881 - protein, 14 aa, Metarhizium rileyi
WCQRPGHDCWKAKR

SEQ ID NO: 2882 - protein, 14 aa, Metarhizium rileyi
WCWRPGQPCWKAKR

SEQ ID NO: 2883 - protein, 12 aa, Metarhizium rileyi
WCWRPGQPCWKR

SEQ ID NO: 2884 - protein, 14 aa, Metarhizium rileyi
WCWRPGQPCWKVKR

SEQ ID NO: 2885 - protein, 14 aa, Metarhizium robertsii
WCNAPGQPCWKAKR

SEQ ID NO: 2886 - protein, 14 aa, Metarhizium robertsii
WCWQPGQPCWKDKR

SEQ ID NO: 2887 - protein, 14 aa, Metarhizium robertsii
WCWRPGQPCWKAKR

SEQ ID NO: 2888 - protein, 14 aa, Metarhizium robertsii
WCWRPGQPCWKVKR

SEQ ID NO: 2889 - protein, 14 aa, Metarhizium robertsii
WCNAPGQPCWKAKR

SEQ ID NO: 2890 - protein, 14 aa, Metarhizium robertsii
WCWQPGQPCWKDKR

SEQ ID NO: 2891 - protein, 14 aa, Metarhizium robertsii
WCWRPGQPCWKAKR

SEQ ID NO: 2892 - protein, 14 aa, Metarhizium robertsii
WCWRPGQPCWKVKR

SEQ ID NO: 2893 - protein, 13 aa, Moelleriella libera
CWHPDGLFAKVKR

SEQ ID NO: 2894 - protein, 13 aa, Moelleriella libera
WCADQGFFCMVKR

SEQ ID NO: 2895 - protein, 14 aa, Moelleriella libera
WCMRRYATCWKAKR

SEQ ID NO: 2896 - protein, 13 aa, Mollisia scopiformis
CGYPGQPCGKAKR

SEQ ID NO: 2897 - protein, 13 aa, Mollisia scopiformis
CGYPGQPCGKLKR

SEQ ID NO: 2898 - protein, 13 aa, Mollisia scopiformis
CGYPGQPCGKVKR

SEQ ID NO: 2899 - protein, 13 aa, Monilinia fructicola
CNMVGGACFEAKR

SEQ ID NO: 2900 - protein, 11 aa, Monilinia fructicola
WCGRPGQGCKR

SEQ ID NO: 2901 - protein, 14 aa, Monilinia fructicola
WCGRPGQGCRKAKR

SEQ ID NO: 2902 - protein, 12 aa, Monilinia fructicola
WCGRPGQGCRKR

SEQ ID NO: 2903 - protein, 14 aa, Monilinia fructicola
WCGRPGQGCRKTKR

SEQ ID NO: 2904 - protein, 13 aa, Monilinia fructigena
CNMVGGACFEAKR

SEQ ID NO: 2905 - protein, 11 aa, Monilinia fructigena
WCGRPGQGCKR

SEQ ID NO: 2906 - protein, 14 aa, Monilinia fructigena
WCGRPGQGCRKAKR

SEQ ID NO: 2907 - protein, 14 aa, Monilinia fructigena
WCGRPGQGCRKTKR

SEQ ID NO: 2908 - protein, 13 aa, Monilinia laxa
CNMVGGACFEAKR

SEQ ID NO: 2909 - protein, 11 aa, Monilinia laxa
WCGRPGQGCKR

SEQ ID NO: 2910 - protein, 14 aa, Monilinia laxa
WCGRPGQGCRKAKR

SEQ ID NO: 2911 - protein, 14 aa, Monilinia laxa
WCGRPGQGCRKTKR

SEQ ID NO: 2912 - protein, 13 aa, Mytilinidion resinicola
CHLPGQSCSKDKR

SEQ ID NO: 2913 - protein, 15 aa, Mytilinidion resinicola
WGCHLPGQSCSKDKR

SEQ ID NO: 2914 - protein, 15 aa, Mytilinidion resinicola
WGCHLPGQSCSKNKR

SEQ ID NO: 2915 - protein, 14 aa, Mytilinidion resinicola
YCHLPGQSCNKDKR

SEQ ID NO: 2916 - protein, 14 aa, Mytilinidion resinicola
YCHLPGQSCSKDKR

SEQ ID NO: 2917 - protein, 14 aa, Mytilinidion resinicola
YCHRPGQSCSKEKR

SEQ ID NO: 2918 - protein, 13 aa, Neofusicoccum parvum
CNEPGEACYQVKR

SEQ ID NO: 2919 - protein, 14 aa, Neofusicoccum parvum
WCRWKGQPCSKAKR

SEQ ID NO: 2920 - protein, 13 aa, Neofusicoccum parvum
WCRWKGQPCSKKR

SEQ ID NO: 2921 - protein, 14 aa, Neofusicoccum parvum
WCRWKGQPCSKLKR

SEQ ID NO: 2922 - protein, 14 aa, Neonectria ditissima
WCIHPGQPCWKAKR

SEQ ID NO: 2923 - protein, 14 aa, Neonectria ditissima
WCIHPGQPCWKKRD

SEQ ID NO: 2924 - protein, 13 aa, Neonectria ditissima
WCKYPGQPCWKKR

SEQ ID NO: 2925 - protein, 14 aa, Neonectria ditissima
WCMHPGQPCWKAKR

SEQ ID NO: 2926 - protein, 14 aa, Neonectria ditissima
WCMHRGQPCWKAKR

SEQ ID NO: 2927 - protein, 14 aa, Neurospora crassa
WCRIHGQSCWKAKR

SEQ ID NO: 2928 - protein, 13 aa, Neurospora crassa
WCRIHGQSCWKKR

SEQ ID NO: 2929 - protein, 12 aa, Neurospora crassa
WCRIHGQSCWKR

SEQ ID NO: 2930 - protein, 14 aa, Neurospora crassa
WCRIHGQSCWKVKR

SEQ ID NO: 2931 - protein, 14 aa, Neurospora crassa
WCRIHGQSCWKAKR

SEQ ID NO: 2932 - protein, 13 aa, Neurospora crassa
WCRIHGQSCWKKR

SEQ ID NO: 2933 - protein, 12 aa, Neurospora crassa
WCRIHGQSCWKR

SEQ ID NO: 2934 - protein, 14 aa, Neurospora crassa
WCRIHGQSCWKVKR

SEQ ID NO: 2935 - protein, 15 aa, Neurospora tetrasperma
WCNMRLHPDRGCWKR

SEQ ID NO: 2936 - protein, 14 aa, Neurospora tetrasperma
WCRIHGQSCWKAKR

SEQ ID NO: 2937 - protein, 13 aa, Neurospora tetrasperma
WCRIHGQSCWKKR

SEQ ID NO: 2938 - protein, 12 aa, Neurospora tetrasperma
WCRIHGQSCWKR

SEQ ID NO: 2939 - protein, 14 aa, Neurospora tetrasperma
WCRIHGQSCWKVKR

SEQ ID NO: 2940 - protein, 13 aa, Neurospora tetrasperma
CNAPDGACTKATR

SEQ ID NO: 2941 - protein, 14 aa, Neurospora tetrasperma
WCRIHGQSCWKAKR

SEQ ID NO: 2942 - protein, 13 aa, Neurospora tetrasperma
WCRIHGQSCWKKR

SEQ ID NO: 2943 - protein, 12 aa, Neurospora tetrasperma
WCRIHGQSCWKR

SEQ ID NO: 2944 - protein, 14 aa, Neurospora tetrasperma
WCWIHGQSCWKVKR

SEQ ID NO: 2945 - protein, 13 aa, Ophiocordyceps camponoti-floridani
CLAEGGACWAAKR

SEQ ID NO: 2946 - protein, 13 aa, Ophiocordyceps camponoti-floridani
CSQRGEACWHQKR

SEQ ID NO: 2947 - protein, 14 aa, Ophiocordyceps camponoti-floridani
WCKRPNSICPKVKR

SEQ ID NO: 2948 - protein, 14 aa, Ophiocordyceps camponoti-floridani
WCTRPNSICSKVKR

SEQ ID NO: 2949 - protein, 14 aa, Ophiocordyceps camponoti-floridani
WCTRPNSQCGPKKR

SEQ ID NO: 2950 - protein, 16 aa, Ophiocordyceps camponoti-floridani
WCTRPNSQCGPKMAKR

SEQ ID NO: 2951 - protein, 14 aa, Ophiocordyceps camponoti-floridani
WCYRPNSQCGPKKR

SEQ ID NO: 2952 - protein, 13 aa, Ophiocordyceps camponoti-rufipedis
CHAEGGACWAAKR

SEQ ID NO: 2953 - protein, 13 aa, Ophiocordyceps camponoti-rufipedis
CSQRGEACWHQKR

SEQ ID NO: 2954 - protein, 14 aa, Ophiocordyceps camponoti-rufipedis
WCKRPNSICSKAKR

SEQ ID NO: 2955 - protein, 14 aa, Ophiocordyceps camponoti-rufipedis
WCKRPNSICSKVKR

SEQ ID NO: 2956 - protein, 16 aa, Ophiocordyceps camponoti-rufipedis
WCKRPNSQCGTAMEKR

SEQ ID NO: 2957 - protein, 15 aa, Ophiocordyceps camponoti-rufipedis
WCTRPLSNCPTVVKR

SEQ ID NO: 2958 - protein, 12 aa, Ophiostoma piceae
LCTWMGQGCLKR

SEQ ID NO: 2959 - protein, 14 aa, Ophiostoma piceae
WCPMVGQPCWKAKR

SEQ ID NO: 2960 - protein, 14 aa, Ophiostoma piceae
WCPMVGQPCWKVKR

SEQ ID NO: 2961 - protein, 14 aa, Penicilliopsis zonata
WCWQPGQGCEKIKR

SEQ ID NO: 2962 - protein, 14 aa, Penicilliopsis zonata
WCWQPGQGCYMLKR

SEQ ID NO: 2963 - protein, 14 aa, Penicillium antarcticum
WCGHPGQGCFKAKR

SEQ ID NO: 2964 - protein, 14 aa, Penicillium antarcticum
WCGHPGQGCYMMKR

SEQ ID NO: 2965 - protein, 14 aa, Penicillium arizonense
WCGHPGQGCFKAKR

SEQ ID NO: 2966 - protein, 14 aa, Penicillium arizonense
WCGHPGQGCYMMKR

SEQ ID NO: 2967 - protein, 14 aa, Penicillium brasilianum
WCAHPGQGCAKVKR

SEQ ID NO: 2968 - protein, 14 aa, Penicillium brasilianum
WCAHPGQGCYMMKR

SEQ ID NO: 2969 - protein, 12 aa, Penicillium brasilianum
WCGHPGQGCAKR

SEQ ID NO: 2970 - protein, 14 aa, Penicillium brasilianum
WCAHPGQGCAKVKR

SEQ ID NO: 2971 - protein, 14 aa, Penicillium brasilianum
WCAHPGQGCYMMKR

SEQ ID NO: 2972 - protein, 12 aa, Penicillium brasilianum
WCGHPGQGCAKR

SEQ ID NO: 2973 - protein, 11 aa, Penicillium chrysogenum
WCGHIGQGCKR

SEQ ID NO: 2974 - protein, 14 aa, Penicillium chrysogenum
WCGHIGQGCYKAKR

SEQ ID NO: 2975 - protein, 14 aa, Penicillium decumbens
WCGHAGQGCSKAKR

SEQ ID NO: 2976 - protein, 14 aa, Penicillium decumbens
WCGHPGQGCYMYKR

SEQ ID NO: 2977 - protein, 11 aa, Penicillium digitatum
WCGHIGQGCKR

SEQ ID NO: 2978 - protein, 14 aa, Penicillium digitatum
WCGHIGQGCYKAKR

SEQ ID NO: 2979 - protein, 11 aa, Penicillium digitatum
WCGHIGQGCKR

SEQ ID NO: 2980 - protein, 14 aa, Penicillium digitatum
WCGHIGQGCYKAKR

SEQ ID NO: 2981 - protein, 14 aa, Penicillium rolfsii
WCAHPGQGCAKVKR

SEQ ID NO: 2982 - protein, 14 aa, Penicillium rolfsii
WCGHPGQGCYMMKR

SEQ ID NO: 2983 - protein, 11 aa, Penicillium roqueforti
WCGHIGQGCKR

SEQ ID NO: 2984 - protein, 14 aa, Penicillium roqueforti
WCGHIGQGCYKAKR

SEQ ID NO: 2985 - protein, 14 aa, Penicillium steckii
WCGHPGQGCYKVKR

SEQ ID NO: 2986 - protein, 14 aa, Penicillium steckii
WCGHPGQGCYMMKR

SEQ ID NO: 2987 - protein, 14 aa, Penicillium subrubescens
WCAHPGQGCAKVKR

SEQ ID NO: 2988 - protein, 14 aa, Penicillium subrubescens
WCAHPGQGCYMMKR

SEQ ID NO: 2989 - protein, 12 aa, Penicillium subrubescens
WCGHPGQGCAKR

SEQ ID NO: 2990 - protein, 14 aa, Phaeoacremonium minimum
WCTKHGQSCWKAKR

SEQ ID NO: 2991 - protein, 13 aa, Phaeoacremonium minimum
WCTKHGQSCWKKR

SEQ ID NO: 2992 - protein, 12 aa, Phaeoacremonium minimum
WCTKHGQSCWKR

SEQ ID NO: 2993 - protein, 14 aa, Phaeoacremonium minimum
WCTKHGQSCWKVKR

SEQ ID NO: 2994 - protein, 14 aa, Phialemoniopsis curvata
WCPIRGQPCWKAKR

SEQ ID NO: 2995 - protein, 12 aa, Phialemoniopsis curvata
WCPIRGQPCWKR

SEQ ID NO: 2996 - protein, 14 aa, Phialemoniopsis curvata
WCPIRGQPCWKVKR

SEQ ID NO: 2997 - protein, 13 aa, Phialocephala subalpina
CGYPGQPCGKAKR

SEQ ID NO: 2998 - protein, 13 aa, Phialocephala subalpina
CGYPGQPCGKVKR

SEQ ID NO: 2999 - protein, 13 aa, Phialocephala subalpina
CGYPGQPCNKAKR

SEQ ID NO: 3000 - protein, 13 aa, Phialocephala subalpina
CGYPGQPCSKAKR

SEQ ID NO: 3001 - protein, 13 aa, Phialocephala subalpina
CGYPGQPCSKVKR

SEQ ID NO: 3002 - protein, 13 aa, Phialocephala subalpina
CGYRGQPCSKLKR

SEQ ID NO: 3003 - protein, 12 aa, Pleomassaria siparia
CHFPGQPCMAKR

SEQ ID NO: 3004 - protein, 12 aa, Pleomassaria siparia
CHFPGQPCMTKR

SEQ ID NO: 3005 - protein, 12 aa, Pleomassaria siparia
CHFPGQPCSSKR

SEQ ID NO: 3006 - protein, 13 aa, Pleomassaria siparia
CHFPGQPCTKEKR

SEQ ID NO: 3007 - protein, 13 aa, Pochonia chlamydosporia
ICNGPGILCWKKR

SEQ ID NO: 3008 - protein, 14 aa, Pochonia chlamydosporia
RCWRPGEPCFKVKR

SEQ ID NO: 3009 - protein, 14 aa, Pochonia chlamydosporia
WCNRPGQSCWKAKR

SEQ ID NO: 3010 - protein, 14 aa, Pochonia chlamydosporia
WCWRPGQPCWKAKR

SEQ ID NO: 3011 - protein, 12 aa, Pochonia chlamydosporia
WCWRPGQPCWKR

SEQ ID NO: 3012 - protein, 14 aa, Pochonia chlamydosporia
WCWRPGQSCWKAKR

SEQ ID NO: 3013 - protein, 13 aa, Pochonia chlamydosporia
ICNGPGILCWKKR

SEQ ID NO: 3014 - protein, 14 aa, Pochonia chlamydosporia
WCHRPGQSCWKAKR

SEQ ID NO: 3015 - protein, 14 aa, Pochonia chlamydosporia
WCWRPGEPCFKVKR

SEQ ID NO: 3016 - protein, 14 aa, Pochonia chlamydosporia
WCWRPGQPCWKAKR

SEQ ID NO: 3017 - protein, 12 aa, Pochonia chlamydosporia
WCWRPGQPCWKR

SEQ ID NO: 3018 - protein, 14 aa, Pochonia chlamydosporia
WCWRPGQSCWKAKR

SEQ ID NO: 3019 - protein, 12 aa, Pochonia chlamydosporia
WCWRPGQSCWKR

SEQ ID NO: 3020 - protein, 13 aa, Podospora comata
CTAEDGACTKAKR

SEQ ID NO: 3021 - protein, 13 aa, Podospora comata
WCLRFVGQSCWKR

SEQ ID NO: 3022 - protein, 14 aa, Podospora comata
WCNTEGQACNTVAR

SEQ ID NO: 3023 - protein, 14 aa, Polychaeton citri
FCGAPGASCAKVKR

SEQ ID NO: 3024 - protein, 13 aa, Polyplosphaeria fusca
CGMPGAPCNRLKR

SEQ ID NO: 3025 - protein, 13 aa, Polyplosphaeria fusca
CLFSGQSCSAAKR

SEQ ID NO: 3026 - protein, 12 aa, Polyplosphaeria fusca
CRFPGSFCGKKR

SEQ ID NO: 3027 - protein, 13 aa, Polyplosphaeria fusca
CRFPGSFCGKSKR

SEQ ID NO: 3028 - protein, 12 aa, Polyplosphaeria fusca
CRYPGSFCGRKR

SEQ ID NO: 3029 - protein, 13 aa, Polyplosphaeria fusca
CSFGDDTCAKIKR

SEQ ID NO: 3030 - protein, 14 aa, Pseudogymnoascus destructans
FCQRPGQLCGKVKR

SEQ ID NO: 3031 - protein, 14 aa, Pseudogymnoascus destructans
FCWRLGQPCDKVKR

SEQ ID NO: 3032 - protein, 14 aa, Pseudogymnoascus destructans
FCWRPGQICEKAKR

SEQ ID NO: 3033 - protein, 14 aa, Pseudogymnoascus destructans
FCWRPGQPCGKAKR

SEQ ID NO: 3034 - protein, 14 aa, Pseudogymnoascus destructans
FCWRPGQPCGKVKR

SEQ ID NO: 3035 - protein, 14 aa, Pseudogymnoascus destructans
FCQRPGQLCGKVKR

SEQ ID NO: 3036 - protein, 14 aa, Pseudogymnoascus destructans
FCWRLGQPCDKVKR

SEQ ID NO: 3037 - protein, 14 aa, Pseudogymnoascus destructans
FCWRPGQICEKAKR

SEQ ID NO: 3038 - protein, 14 aa, Pseudogymnoascus destructans
FCWRPGQPCGKAKR

SEQ ID NO: 3039 - protein, 14 aa, Pseudogymnoascus destructans
FCWRPGQPCGKVKR

SEQ ID NO: 3040 - protein, 13 aa, Pseudogymnoascus sp.
  source 1..13: note = 03VT05
CWRPGQPCGKAKR

SEQ ID NO: 3041 - protein, 13 aa, Pseudogymnoascus sp.
  source 1..13: note = 03VT05
CWRPGQPCGKVKR

SEQ ID NO: 3042 - protein, 14 aa, Pseudogymnoascus sp.
  source 1..14: note = 03VT05
ICWRPGQPCGKAKR

SEQ ID NO: 3043 - protein, 13 aa, Pseudogymnoascus sp.
  source 1..13: note = 05NY08
CWRPGQPCGKAKR

SEQ ID NO: 3044 - protein, 13 aa, Pseudogymnoascus sp.
  source 1..13: note = 05NY08
CWRPGQPCGKVKR

SEQ ID NO: 3045 - protein, 14 aa, Pseudogymnoascus sp.
  source 1..14: note = 05NY08
ICWRPGQPCGKAKR

SEQ ID NO: 3046 - protein, 13 aa, Pseudogymnoascus sp.
  source 1..13: note = 24MN13
CWRPGQPCGKVKR

SEQ ID NO: 3047 - protein, 14 aa, Pseudogymnoascus sp.
  source 1..14: note = 24MN13
ICWRPGQPCGKAKR

SEQ ID NO: 3048 - protein, 8 aa, Pseudogymnoascus sp.
  source 1..8: note = 24MN13
QPCGKAKR

SEQ ID NO: 3049 - protein, 14 aa, Pseudogymnoascus sp.
  source 1..14: note = 23342-1-I1
FCWRPGQPCGKAKR

SEQ ID NO: 3050 - protein, 14 aa, Pseudogymnoascus sp.
  source 1..14: note = 23342-1-I1
FCWRPGQPCGKVKR

SEQ ID NO: 3051 - protein, 13 aa, Pseudogymnoascus sp.
  source 1..13: note = VKM F-103
CWRPGQPCGKAKR

SEQ ID NO: 3052 - protein, 13 aa, Pseudogymnoascus sp.
  source 1..13: note = VKM F-103
CWRPGQPCGKVKR

SEQ ID NO: 3053 - protein, 14 aa, Pseudogymnoascus sp.
  source 1..14: note = VKM F-103
ICWRPGQPCGKAKR

SEQ ID NO: 3054 - protein, 13 aa, Pseudogymnoascus sp.
  source 1..13: note = VKM F-3557
CWRPGQPCGKAKR

SEQ ID NO: 3055 - protein, 13 aa, Pseudogymnoascus sp.
  source 1..13: note = VKM F-3557
CWRPGQPCGKVKR

SEQ ID NO: 3056 - protein, 14 aa, Pseudogymnoascus sp.
  source 1..14: note = VKM F-3557
ICWRPGQPCGKAKR

SEQ ID NO: 3057 - protein, 13 aa, Pseudogymnoascus sp.
  source 1..13: note = VKM F-3775
CWRPGQPCGKAKR

SEQ ID NO: 3058 - protein, 13 aa, Pseudogymnoascus sp.
  source 1..13: note = VKM F-3775
CWRPGQPCGKVKR

SEQ ID NO: 3059 - protein, 13 aa, Pseudogymnoascus sp.
  source 1..13: note = VKM F-4246
CWLPGQPCGKAKR

SEQ ID NO: 3060 - protein, 13 aa, Pseudogymnoascus sp.
  source 1..13: note = VKM F-4246
CWLPGQPCGKVKR

SEQ ID NO: 3061 - protein, 13 aa, Pseudogymnoascus sp.
  source 1..13: note = VKM F-4281
CHRPGQPCGKAKR

SEQ ID NO: 3062 - protein, 13 aa, Pseudogymnoascus sp.
  source 1..13: note = VKM F-4281
CHRPGQPCGKVKR

SEQ ID NO: 3063 - protein, 14 aa, Pseudogymnoascus sp.
  source 1..14: note = VKM F-4281
FCHRPGQPCGKLKR

SEQ ID NO: 3064 - protein, 14 aa, Pseudogymnoascus sp.
  source 1..14: note = VKM F-4281
FCHRPGRPCGKAKR

SEQ ID NO: 3065 - protein, 13 aa, Pseudogymnoascus sp.
  source 1..13: note = VKM F-4513
CWLPGQPCGKAKR

SEQ ID NO: 3066 - protein, 13 aa, Pseudogymnoascus sp.
  source 1..13: note = VKM F-4513
CWLPGQPCGKVKR

SEQ ID NO: 3067 - protein, 13 aa, Pseudogymnoascus sp.
  source 1..13: note = VKM F-4514
CWRPGQPCGKAKR

SEQ ID NO: 3068 - protein, 13 aa, Pseudogymnoascus sp.
  source 1..13: note = VKM F-4514
CWRPGQPCGKVKR

SEQ ID NO: 3069 - protein, 14 aa, Pseudogymnoascus sp.
  source 1..14: note = VKM F-4514
ICWRPGQPCGKAKR

SEQ ID NO: 3070 - protein, 14 aa, Pseudogymnoascus sp.
  source 1..14: note = VKM F-4515
YCWRPGQPCGKAKR

SEQ ID NO: 3071 - protein, 14 aa, Pseudogymnoascus sp.
  source 1..14: note = VKM F-4515
YCWRPGQPCGKVKR

SEQ ID NO: 3072 - protein, 13 aa, Pseudogymnoascus sp.
  source 1..13: note = VKM F-4516
CWRPGQPCGKAKR

SEQ ID NO: 3073 - protein, 13 aa, Pseudogymnoascus sp.
  source 1..13: note = VKM F-4516
CWRPGQPCGKVKR

SEQ ID NO: 3074 - protein, 14 aa, Pseudogymnoascus sp.
  source 1..14: note = VKM F-4516
ICWRPGQPCGKAKR

SEQ ID NO: 3075 - protein, 14 aa, Pseudogymnoascus sp.
  source 1..14: note = VKM F-4517
YCWRPGQPCGKAKR

SEQ ID NO: 3076 - protein, 14 aa, Pseudogymnoascus sp.
  source 1..14: note = VKM F-4517
YCWRPGQPCGKVKR

SEQ ID NO: 3077 - protein, 14 aa, Pseudogymnoascus sp.
  source 1..14: note = VKM F-4518
FCWRPGQPCGKAKR

SEQ ID NO: 3078 - protein, 14 aa, Pseudogymnoascus sp.
  source 1..14: note = VKM F-4518
FCWRPGQPCGKVKR

SEQ ID NO: 3079 - protein, 13 aa, Pseudogymnoascus sp.
  source 1..13: note = VKM F-4519
CWRPGQPCGKAKR

SEQ ID NO: 3080 - protein, 13 aa, Pseudogymnoascus sp.
  source 1..13: note = VKM F-4519
CWRPGQPCGKVKR

SEQ ID NO: 3081 - protein, 14 aa, Pseudogymnoascus sp.
  source 1..14: note = VKM F-4519
ICWRPGQPCGKAKR

SEQ ID NO: 3082 - protein, 14 aa, Pseudogymnoascus sp.
  source 1..14: note = VKM F-4520
FCWRPGQPCGKAKR

SEQ ID NO: 3083 - protein, 14 aa, Pseudogymnoascus sp.
  source 1..14: note = VKM F-4520
FCWRPGQPCGKVKR

SEQ ID NO: 3084 - protein, 13 aa, Pseudogymnoascus sp.
  source 1..13: note = WSF 3629
CWRPGQPCGIVKR

SEQ ID NO: 3085 - protein, 13 aa, Pseudogymnoascus sp.
  source 1..13: note = WSF 3629
CWRPGQPCGKAKR

SEQ ID NO: 3086 - protein, 13 aa, Pseudogymnoascus sp.
  source 1..13: note = WSF 3629
CWRPGQPCGKVKR

SEQ ID NO: 3087 - protein, 14 aa, Pseudogymnoascus sp.
  source 1..14: note = WSF 3629
ICWRPGQPCGKAKR

SEQ ID NO: 3088 - protein, 13 aa, Pseudogymnoascus verrucosus
CWRPGQPCGKAKR

SEQ ID NO: 3089 - protein, 13 aa, Pseudogymnoascus verrucosus
CWRPGQPCGKVKR

SEQ ID NO: 3090 - protein, 14 aa, Pseudogymnoascus verrucosus
ICWRPGQPCGKAKR

SEQ ID NO: 3091 - protein, 11 aa, Purpureocillium lilacinum
WCNRPGQPCKR

SEQ ID NO: 3092 - protein, 11 aa, Purpureocillium lilacinum
WCTRPGQPCKR

SEQ ID NO: 3093 - protein, 11 aa, Purpureocillium lilacinum
WCTRRGQPCKR

SEQ ID NO: 3094 - protein, 14 aa, Purpureocillium lilacinum
WCYRPGQPCRKAKR

SEQ ID NO: 3095 - protein, 11 aa, Purpureocillium lilacinum
WCNRPGQPCKR

SEQ ID NO: 3096 - protein, 11 aa, Purpureocillium lilacinum
WCTRPGQPCKR

SEQ ID NO: 3097 - protein, 11 aa, Purpureocillium lilacinum
WCTRRGQPCKR

SEQ ID NO: 3098 - protein, 14 aa, Purpureocillium lilacinum
WCYRPGQPCRKAKR

SEQ ID NO: 3099 - protein, 11 aa, Purpureocillium lilacinum
WCNRPGQPCKR

SEQ ID NO: 3100 - protein, 11 aa, Purpureocillium lilacinum
WCTRPGQPCKR

SEQ ID NO: 3101 - protein, 11 aa, Purpureocillium lilacinum
WCTRRGQPCKR

SEQ ID NO: 3102 - protein, 14 aa, Purpureocillium lilacinum
WCYRPGQPCRKAKR

SEQ ID NO: 3103 - protein, 14 aa, Pyricularia grisea
HCNEAGEACDVAKR

SEQ ID NO: 3104 - protein, 12 aa, Pyricularia grisea
WCPRRGQPCWKR

SEQ ID NO: 3105 - protein, 14 aa, Pyricularia grisea
WCPRRGQPCWKVKR

SEQ ID NO: 3106 - protein, 14 aa, Pyricularia oryzae
HCNSAGEACDVAKR

SEQ ID NO: 3107 - protein, 12 aa, Pyricularia oryzae
WCPRRGQPCWKR

SEQ ID NO: 3108 - protein, 14 aa, Pyricularia oryzae
WCPRRGQPCWKVKR

SEQ ID NO: 3109 - protein, 14 aa, Pyricularia oryzae
HCNSAGEACDVAKR

SEQ ID NO: 3110 - protein, 12 aa, Pyricularia oryzae
WCPRRGQPCWKR

SEQ ID NO: 3111 - protein, 14 aa, Pyricularia oryzae
WCPRRGQPCWKVKR

SEQ ID NO: 3112 - protein, 14 aa, Pyricularia oryzae
HCNSAGEACDVAKR

SEQ ID NO: 3113 - protein, 12 aa, Pyricularia oryzae
WCPRRGQPCWKR

SEQ ID NO: 3114 - protein, 14 aa, Pyricularia oryzae
WCPRRGQPCWKVKR

SEQ ID NO: 3115 - protein, 14 aa, Pyricularia oryzae
HCNSAGEACDVAKR

SEQ ID NO: 3116 - protein, 12 aa, Pyricularia oryzae
WCPRRGQPCWKR

SEQ ID NO: 3117 - protein, 14 aa, Pyricularia oryzae
WCPRRGQPCWKVKR

SEQ ID NO: 3118 - protein, 12 aa, Pyricularia pennisetigena
WCPRRGQPCWKR

SEQ ID NO: 3119 - protein, 14 aa, Pyricularia pennisetigena
WCPRRGQPCWKVKR

SEQ ID NO: 3120 - protein, 14 aa, Pyricularia sp.
  source 1..14: note = CBS 133598
HCNSAGEACDVAKR

SEQ ID NO: 3121 - protein, 12 aa, Pyricularia sp.
  source 1..12: note = CBS 133598
WCPRRGQPCWKR

SEQ ID NO: 3122 - protein, 14 aa, Pyricularia sp.
  source 1..14: note = CBS 133598
WCPRRGQPCWKVKR

SEQ ID NO: 3123 - protein, 13 aa, Ramularia collo-cygni
CGAPGVACHKARR

SEQ ID NO: 3124 - protein, 13 aa, Ramularia collo-cygni
CGIPGSPCARLKR

SEQ ID NO: 3125 - protein, 13 aa, Ramularia collo-cygni
CNAPGGACDIAKR

SEQ ID NO: 3126 - protein, 14 aa, Ramularia collo-cygni
FCGPRGVSCAKAKR

SEQ ID NO: 3127 - protein, 14 aa, Ramularia collo-cygni
FCGPRGVSCAKTKR

SEQ ID NO: 3128 - protein, 14 aa, Ramularia collo-cygni
FCGPRGVSCAKVKR

SEQ ID NO: 3129 - protein, 13 aa, Rhizodiscina lignyota
CNKDGQPCAKAKR

SEQ ID NO: 3130 - protein, 13 aa, Rhizodiscina lignyota
CYKEGGKCQKAKR

SEQ ID NO: 3131 - protein, 14 aa, Rhizodiscina lignyota
LCHLVGQPCLKKKR

SEQ ID NO: 3132 - protein, 21 aa, Rutstroemia sp.
  source 1..21: note = NJR-2017a BBW
FDEAVVKRCNMVGGACYEAKR

SEQ ID NO: 3133 - protein, 13 aa, Rutstroemia sp.
  source 1..13: note = NJR-2017a BBW
WCGRPGQPCKEKR

SEQ ID NO: 3134 - protein, 11 aa, Rutstroemia sp.
  source 1..11: note = NJR-2017a BBW
WCGRPGQPCKR

SEQ ID NO: 3135 - protein, 14 aa, Rutstroemia sp.
  source 1..14: note = NJR-2017a BBW
WCGRPGQPCRKAKR

SEQ ID NO: 3136 - protein, 21 aa, Rutstroemia sp.
  source 1..21: note = NJR-2017a BVV2
FDEAVVKRCNMVGGACYEAKR

SEQ ID NO: 3137 - protein, 13 aa, Rutstroemia sp.
  source 1..13: note = NJR-2017a BVV2
WCGRPGQPCKEKR

SEQ ID NO: 3138 - protein, 11 aa, Rutstroemia sp.
  source 1..11: note = NJR-2017a BVV2
WCGRPGQPCKR

SEQ ID NO: 3139 - protein, 14 aa, Rutstroemia sp.
  source 1..14: note = NJR-2017a BVV2
WCGRPGQPCRKAKR

SEQ ID NO: 3140 - protein, 14 aa, Rutstroemia sp.
  source 1..14: note = NJR-2017a BVV2
WCGRPGQPCRKVRR

SEQ ID NO: 3141 - protein, 21 aa, Rutstroemia sp.
  source 1..21: note = NJR-2017a WRK4
FDEAVVKRCNMVGGACYEAKR

SEQ ID NO: 3142 - protein, 13 aa, Rutstroemia sp.
  source 1..13: note = NJR-2017a WRK4
WCGRPGQPCKEKR

SEQ ID NO: 3143 - protein, 11 aa, Rutstroemia sp.
  source 1..11: note = NJR-2017a WRK4
WCGRPGQPCKR

SEQ ID NO: 3144 - protein, 14 aa, Rutstroemia sp.
  source 1..14: note = NJR-2017a WRK4
WCGRPGQPCRKAKR

SEQ ID NO: 3145 - protein, 14 aa, Saccharata proteae
FCHLPGQPCSKAKR

SEQ ID NO: 3146 - protein, 14 aa, Saccharata proteae
FCHLPGQPCSKLKR

SEQ ID NO: 3147 - protein, 14 aa, Saccharata proteae
FCHLPGQPCSKTKR

SEQ ID NO: 3148 - protein, 14 aa, Sclerotinia borealis
RCNMVGGACFEAKR

SEQ ID NO: 3149 - protein, 11 aa, Sclerotinia borealis
WCGRPGQACKR

SEQ ID NO: 3150 - protein, 13 aa, Sclerotinia borealis
WCGRPGQPCKEKR

SEQ ID NO: 3151 - protein, 11 aa, Sclerotinia borealis
WCGRPGQPCKR

SEQ ID NO: 3152 - protein, 14 aa, Sclerotinia borealis
WCGRPGQPCRKAKR

SEQ ID NO: 3153 - protein, 14 aa, Sclerotinia borealis
WCGRPGQPCRKNKR

SEQ ID NO: 3154 - protein, 14 aa, Sclerotinia sclerotiorum
RCNMVGGACFEAKR

SEQ ID NO: 3155 - protein, 13 aa, Sclerotinia sclerotiorum
WCGRPGQPCKEKR

SEQ ID NO: 3156 - protein, 11 aa, Sclerotinia sclerotiorum
WCGRPGQPCKR

SEQ ID NO: 3157 - protein, 14 aa, Sclerotinia sclerotiorum
WCGRPGQPCRKAKR

SEQ ID NO: 3158 - protein, 14 aa, Sclerotinia sclerotiorum
WCGRPGQPCRKNKR

SEQ ID NO: 3159 - protein, 13 aa, Sclerotinia sclerotiorum
CNMVGGACFEAKR

SEQ ID NO: 3160 - protein, 13 aa, Sclerotinia sclerotiorum
WCGRPGQPCKEKR

SEQ ID NO: 3161 - protein, 11 aa, Sclerotinia sclerotiorum
WCGRPGQPCKR

SEQ ID NO: 3162 - protein, 14 aa, Sclerotinia sclerotiorum
WCGRPGQPCRKAKR

SEQ ID NO: 3163 - protein, 14 aa, Sclerotinia sclerotiorum
WCGRPGQPCRKNKR

SEQ ID NO: 3164 - protein, 13 aa, Sodiomyces alkalinus
CTKPGQPCWKNKR

SEQ ID NO: 3165 - protein, 11 aa, Sodiomyces alkalinus
CTKPGQPCWKR

SEQ ID NO: 3166 - protein, 14 aa, Sordaria macrospora
WCRIHGQSCWKAKR

SEQ ID NO: 3167 - protein, 15 aa, Sordaria macrospora
WCRIHGQSCWKKAKR

SEQ ID NO: 3168 - protein, 13 aa, Sordaria macrospora
WCRIHGQSCWKKR

SEQ ID NO: 3169 - protein, 12 aa, Sordaria macrospora
WCRIHGQSCWKR

SEQ ID NO: 3170 - protein, 14 aa, Sordaria macrospora
WCRIHGQSCWKVKR

SEQ ID NO: 3171 - protein, 14 aa, Sordaria macrospora
WCRIHGQSCWKAKR

SEQ ID NO: 3172 - protein, 15 aa, Sordaria macrospora
WCRIHGQSCWKKAKR

SEQ ID NO: 3173 - protein, 13 aa, Sordaria macrospora
WCRIHGQSCWKKR

SEQ ID NO: 3174 - protein, 12 aa, Sordaria macrospora
WCRIHGQSCWKR

SEQ ID NO: 3175 - protein, 14 aa, Sordaria macrospora
WCRIHGQSCWKVKR

SEQ ID NO: 3176 - protein, 14 aa, unidentified
  REGION 1..14: note = TPA: Pheromone PPGAPutative uncharacterized protein
WCRFAGRICPPTKR

SEQ ID NO: 3177 - protein, 14 aa, unidentified
  REGION 1..14: note = TPA: Pheromone PPGAPutative uncharacterized protein
WCRFRGQVCGKAKR

SEQ ID NO: 3178 - protein, 12 aa, Sporothrix brasiliensis
YCPLKGQSCWKR

SEQ ID NO: 3179 - protein, 14 aa, Sporothrix brasiliensis
YCPLKGQSCWKYKR

SEQ ID NO: 3180 - protein, 14 aa, Sporothrix brasiliensis
YCPLPGQPCWKNKR

SEQ ID NO: 3181 - protein, 14 aa, Sporothrix brasiliensis
YCQQAGQSCYQVKR

SEQ ID NO: 3182 - protein, 13 aa, Sporothrix insectorum
CYGPGGHCAAAKR

SEQ ID NO: 3183 - protein, 14 aa, Sporothrix insectorum
FCMWFGQSCWKVKR

SEQ ID NO: 3184 - protein, 13 aa, Sporothrix insectorum
FCMWFGQSCWRKR

SEQ ID NO: 3185 - protein, 12 aa, Sporothrix schenckii
YCPLKGQSCWKR

SEQ ID NO: 3186 - protein, 14 aa, Sporothrix schenckii
YCPLPGQPCWKNKR

SEQ ID NO: 3187 - protein, 14 aa, Sporothrix schenckii
YCQSVGQSCYQVKR

SEQ ID NO: 3188 - protein, 12 aa, Sporothrix schenckii
YCPLKGQSCWKR

SEQ ID NO: 3189 - protein, 14 aa, Sporothrix schenckii
YCPLPGQPCWKNKR

SEQ ID NO: 3190 - protein, 14 aa, Sporothrix schenckii
YCQSVGQSCYQVKR

SEQ ID NO: 3191 - protein, 14 aa, Stachybotrys chartarum
WCTRPGQPCWKAKR

SEQ ID NO: 3192 - protein, 13 aa, Stachybotrys chartarum
WCTRPGQPCWKKR

SEQ ID NO: 3193 - protein, 14 aa, Stachybotrys chartarum
WCVRPGQPCWKVKR

SEQ ID NO: 3194 - protein, 14 aa, Stachybotrys chartarum
WCTRPGQPCWKAKR

SEQ ID NO: 3195 - protein, 13 aa, Stachybotrys chartarum
WCTRPGQPCWKKR

SEQ ID NO: 3196 - protein, 14 aa, Stachybotrys chartarum
WCVRPGQPCWKVKR

SEQ ID NO: 3197 - protein, 14 aa, Stachybotrys chartarum
WCTRPGQPCWKAKR

SEQ ID NO: 3198 - protein, 13 aa, Stachybotrys chartarum
WCTRPGQPCWKKR

SEQ ID NO: 3199 - protein, 14 aa, Stachybotrys chartarum
WCVRPGQPCWKVKR

SEQ ID NO: 3200 - protein, 14 aa, Stachybotrys chlorohalonata
WCTRPGQPCWKAKR

SEQ ID NO: 3201 - protein, 14 aa, Stachybotrys chlorohalonata
WCTRPGQPCWKEKR

SEQ ID NO: 3202 - protein, 14 aa, Stachybotrys chlorohalonata
WCVRPGQPCWKVKR

SEQ ID NO: 3203 - protein, 13 aa, Thermothielavioides terrestris
CESEGNACWTAKR

SEQ ID NO: 3204 - protein, 13 aa, Thermothielavioides terrestris
MCSRFVGESCYKR

SEQ ID NO: 3205 - protein, 14 aa, Thermothielavioides terrestris
WCSTEGQPCDTVKR

SEQ ID NO: 3206 - protein, 15 aa, Thermothielavioides terrestris
WCTFFLGQPCWKNKR

SEQ ID NO: 3207 - protein, 13 aa, Thermothielavioides terrestris
WCTFFLGQPCWKR

SEQ ID NO: 3208 - protein, 15 aa, Tothia fuscella
WRCFRRGQPCGKAKR

SEQ ID NO: 3209 - protein, 15 aa, Tothia fuscella
WRCFRRGQPCGKLKR

SEQ ID NO: 3210 - protein, 15 aa, Tothia fuscella
WRCFRRGQPCGKVKR

SEQ ID NO: 3211 - protein, 14 aa, Trichoderma arundinaceum
WCYRIGEPCWKAKR

SEQ ID NO: 3212 - protein, 14 aa, Trichoderma arundinaceum
WCYRIGEPCWKVKR

SEQ ID NO: 3213 - protein, 14 aa, Trichoderma arundinaceum
WCYRIGQPCWKAKR

SEQ ID NO: 3214 - protein, 14 aa, Trichoderma asperellum
WCWRVGESCWKAKR

SEQ ID NO: 3215 - protein, 14 aa, Trichoderma asperellum
WCWRVGESCWKAKR

SEQ ID NO: 3216 - protein, 14 aa, Trichoderma atroviride
WCWRVGESCWKAKR

SEQ ID NO: 3217 - protein, 14 aa, Trichoderma citrinoviride
WCFILGRQCWKTKR

SEQ ID NO: 3218 - protein, 14 aa, Trichoderma citrinoviride
WCYRIGEPCWKAKR

SEQ ID NO: 3219 - protein, 14 aa, Trichoderma citrinoviride
WCYRIGEPCWKLKR

SEQ ID NO: 3220 - protein, 14 aa, Trichoderma citrinoviride
WCYRIGQPCWKAKR

SEQ ID NO: 3221 - protein, 14 aa, Trichoderma gamsii
WCWRVGESCWKAKR

SEQ ID NO: 3222 - protein, 14 aa, Trichoderma gamsii
WCWRVGESCWKAKR

SEQ ID NO: 3223 - protein, 13 aa, Trichoderma guizhouense
CFQNGGDCQKAKR

SEQ ID NO: 3224 - protein, 14 aa, Trichoderma guizhouense
MCNSVGQPCWKAQR

SEQ ID NO: 3225 - protein, 14 aa, Trichoderma guizhouense
WCYRIGEGCWIPKR

SEQ ID NO: 3226 - protein, 14 aa, Trichoderma guizhouense
WCYRIGTPCWIPKR

SEQ ID NO: 3227 - protein, 14 aa, Trichoderma guizhouense
WCYRVGEGCWIPKR

SEQ ID NO: 3228 - protein, 14 aa, Trichoderma harzianum
MCNSVGQPCWKAER

SEQ ID NO: 3229 - protein, 14 aa, Trichoderma harzianum
WCYLLGMPCWIPKR

SEQ ID NO: 3230 - protein, 14 aa, Trichoderma harzianum
WCYRIGESCWIPKR

SEQ ID NO: 3231 - protein, 13 aa, Trichoderma harzianum
CFQNGGDCQKAKR

SEQ ID NO: 3232 - protein, 14 aa, Trichoderma harzianum
MCNSVGQPCWKAQR

SEQ ID NO: 3233 - protein, 14 aa, Trichoderma harzianum
WCYRPGEPCWVPKR

SEQ ID NO: 3234 - protein, 14 aa, Trichoderma harzianum
WCYRVGMPCWIPKR

SEQ ID NO: 3235 - protein, 13 aa, Trichoderma harzianum
CFQNGGDCWKAKR

SEQ ID NO: 3236 - protein, 14 aa, Trichoderma harzianum
WCYRIGEPCWKIKR

SEQ ID NO: 3237 - protein, 14 aa, Trichoderma harzianum
WCYRIGMPCWIPKR

SEQ ID NO: 3238 - protein, 14 aa, Trichoderma harzianum
WCYRIGQPCWKAKR

SEQ ID NO: 3239 - protein, 13 aa, Trichoderma harzianum
CFQNGGDCQKAKR

SEQ ID NO: 3240 - protein, 14 aa, Trichoderma harzianum
MCNSVGQPCWKAQR

SEQ ID NO: 3241 - protein, 14 aa, Trichoderma harzianum
WCYRPGEPCWVPKR

SEQ ID NO: 3242 - protein, 14 aa, Trichoderma lentiforme
MCNSVGQPCWKAER

SEQ ID NO: 3243 - protein, 14 aa, Trichoderma lentiforme
WCYRIGMSCWVPKR

SEQ ID NO: 3244 - protein, 14 aa, Trichoderma lentiforme
WCYRLGMPCWVPKR

SEQ ID NO: 3245 - protein, 14 aa, Trichoderma lentiforme
WCYRPGEPCWVPKR

SEQ ID NO: 3246 - protein, 14 aa, Trichoderma longibrachiatum
WCYRIGEPCWKAKR

SEQ ID NO: 3247 - protein, 14 aa, Trichoderma longibrachiatum
WCYRIGEPCWKIKR

SEQ ID NO: 3248 - protein, 14 aa, Trichoderma longibrachiatum
WCYRVGQPCWKAKR

SEQ ID NO: 3249 - protein, 14 aa, Trichoderma parareesei
WCWILGGKCWKTKR

SEQ ID NO: 3250 - protein, 14 aa, Trichoderma parareesei
WCYRIGEPCWKAKR

SEQ ID NO: 3251 - protein, 14 aa, Trichoderma parareesei
WCYRIGEPCWKLKR

SEQ ID NO: 3252 - protein, 14 aa, Trichoderma reesei
WCWILGGKCWKTKR

SEQ ID NO: 3253 - protein, 14 aa, Trichoderma reesei
WCYRIGEPCWKAKR

SEQ ID NO: 3254 - protein, 14 aa, Trichoderma reesei
WCYRIGEPCWKLKR

SEQ ID NO: 3255 - protein, 14 aa, Trichoderma reesei
WCWILGGKCWKTKR

SEQ ID NO: 3256 - protein, 14 aa, Trichoderma reesei
WCYRIGEPCWKAKR

SEQ ID NO: 3257 - protein, 14 aa, Trichoderma reesei
WCYRIGEPCWKLKR

SEQ ID NO: 3258 - protein, 13 aa, Trichoderma virens
CNQIGQPCWKVKR

SEQ ID NO: 3259 - protein, 14 aa, Trichoderma virens
WCYQTGQPCWKAKR

SEQ ID NO: 3260 - protein, 15 aa, Trichoderma virens
WCYRVGMTCGWKKKR

SEQ ID NO: 3261 - protein, 15 aa, Trichoderma virens
WCYRVGMTCGWKNKR

SEQ ID NO: 3262 - protein, 12 aa, Ustilaginoidea virens
WCDRPGEPCWKR

SEQ ID NO: 3263 - protein, 14 aa, Ustilaginoidea virens
WCDRPGEPCWKVKR

SEQ ID NO: 3264 - protein, 14 aa, Ustilaginoidea virens
WCDRPGQPCWKVKR

SEQ ID NO: 3265 - protein, 14 aa, Ustilaginoidea virens
WCWRPGEPCWKVKR

SEQ ID NO: 3266 - protein, 14 aa, Ustilaginoidea virens
WCWRPGQPCWKAKR

SEQ ID NO: 3267 - protein, 12 aa, Ustilaginoidea virens
WCDRPGEPCWKR

SEQ ID NO: 3268 - protein, 14 aa, Ustilaginoidea virens
WCDRPGEPCWKVKR

SEQ ID NO: 3269 - protein, 14 aa, Ustilaginoidea virens
WCDRPGQPCWKVKR

SEQ ID NO: 3270 - protein, 14 aa, Ustilaginoidea virens
WCWRPGEPCWKVKR

SEQ ID NO: 3271 - protein, 14 aa, Ustilaginoidea virens
WCWRPGQPCWKAKR

SEQ ID NO: 3272 - protein, 14 aa, Valsa malicola
SCEQPGEACNKARR

SEQ ID NO: 3273 - protein, 12 aa, Valsa malicola
WCLLKGQGCWKR

SEQ ID NO: 3274 - protein, 14 aa, Valsa malicola
WCLMKGQGCWKVKR

SEQ ID NO: 3275 - protein, 14 aa, Valsa mali
SCEQPGEACYKARR

SEQ ID NO: 3276 - protein, 12 aa, Valsa mali
WCLFKGEGCWKR

SEQ ID NO: 3277 - protein, 14 aa, Valsa mali
WCLFKGEGCWKVKR

SEQ ID NO: 3278 - protein, 13 aa, Valsa mali
CEQPGEACYKARR

SEQ ID NO: 3279 - protein, 12 aa, Valsa mali
WCLFKGEGCWKR

SEQ ID NO: 3280 - protein, 14 aa, Valsa mali
WCLFKGEGCWKVKR

SEQ ID NO: 3281 - protein, 17 aa, Valsa sordida
FCPFGGEAGSTCYASKR

SEQ ID NO: 3282 - protein, 12 aa, Valsa sordida
WCLLKGQGCWKR

SEQ ID NO: 3283 - protein, 14 aa, Valsa sordida
WCLLKGQGCWKVKR

SEQ ID NO: 3284 - protein, 13 aa, Venustampulla echinocandica
CTHVGQGCWKDKR

SEQ ID NO: 3285 - protein, 12 aa, Venustampulla echinocandica
CTHVGQGCWKEK

SEQ ID NO: 3286 - protein, 11 aa, Venustampulla echinocandica
CTHVGQGCWKR

SEQ ID NO: 3287 - protein, 13 aa, Verticillium alfalfae
CPRPGQGCWKAKR

SEQ ID NO: 3288 - protein, 13 aa, Verticillium alfalfae
CPRPGQGCWKNKR

SEQ ID NO: 3289 - protein, 13 aa, Verticillium dahliae
CPRPGQGCWKAKR

SEQ ID NO: 3290 - protein, 13 aa, Verticillium dahliae
CPRPGQGCWKNKR

SEQ ID NO: 3291 - protein, 13 aa, Verticillium dahliae
CPRPGQGCWKAKR

SEQ ID NO: 3292 - protein, 13 aa, Verticillium dahliae
CPRPGQGCWKNKR

SEQ ID NO: 3293 - protein, 13 aa, Verticillium dahliae
CPRPGQGCWKAKR

SEQ ID NO: 3294 - protein, 13 aa, Verticillium dahliae
CPRPGQGCWKNKR

SEQ ID NO: 3295 - protein, 13 aa, Verticillium dahliae
CPRPGQGCWKAKR

SEQ ID NO: 3296 - protein, 13 aa, Verticillium dahliae
CPRPGQGCWKNKR

SEQ ID NO: 3297 - protein, 13 aa, Verticillium dahliae
CPRPGQGCWKAKR

SEQ ID NO: 3298 - protein, 13 aa, Verticillium dahliae
CPRPGQGCWKNKR

SEQ ID NO: 3299 - protein, 13 aa, Verticillium dahliae
CPRPGQGCWKAKR

SEQ ID NO: 3300 - protein, 13 aa, Verticillium dahliae
CPRPGQGCWKNKR

SEQ ID NO: 3301 - protein, 13 aa, Verticillium dahliae
CPRPGQGCWKAKR

SEQ ID NO: 3302 - protein, 13 aa, Verticillium dahliae
CPRPGQGCWKNKR

SEQ ID NO: 3303 - protein, 13 aa, Verticillium dahliae
CPRPGQGCWKAKR

SEQ ID NO: 3304 - protein, 13 aa, Verticillium dahliae
CPRPGQGCWKNKR

SEQ ID NO: 3305 - protein, 13 aa, Verticillium dahliae
CPRPGQGCWKAKR

SEQ ID NO: 3306 - protein, 13 aa, Verticillium dahliae
CPRPGQGCWKNKR

SEQ ID NO: 3307 - protein, 13 aa, Verticillium dahliae
CPRPGQGCWKAKR

SEQ ID NO: 3308 - protein, 13 aa, Verticillium dahliae
CPRPGQGCWKNKR

SEQ ID NO: 3309 - protein, 13 aa, Verticillium longisporum
CPRPGQGCWKNKR

SEQ ID NO: 3310 - protein, 13 aa, Verticillium longisporum
CPRPGQGCWKNKR

SEQ ID NO: 3311 - protein, 13 aa, Verticillium longisporum
CSRPGQGCWKAKR

SEQ ID NO: 3312 - protein, 13 aa, Verticillium longisporum
CSRPGQGCWKNKR

SEQ ID NO: 3313 - protein, 13 aa, Verticillium longisporum
CPRPGQGCWKNKR

SEQ ID NO: 3314 - protein, 13 aa, Verticillium longisporum
CSRPGQGCWKAKR

SEQ ID NO: 3315 - protein, 13 aa, Verticillium longisporum
CSRPGQGCWKNKR

SEQ ID NO: 3316 - protein, 13 aa, Verticillium nonalfalfae
CPRPGQGCWKAKR

SEQ ID NO: 3317 - protein, 13 aa, Verticillium nonalfalfae
CPRPGQGCWKNKR

SEQ ID NO: 3318 - protein, 12 aa, Westerdykella ornata
CWFRGQPCKAKR

SEQ ID NO: 3319 - protein, 13 aa, Westerdykella ornata
CWFRGQPCKKVKR

SEQ ID NO: 3320 - protein, 13 aa, Westerdykella ornata
CWFRGQPCRKLKR

SEQ ID NO: 3321 - protein, 13 aa, Westerdykella ornata
CWFRGQPCSKAKR

SEQ ID NO: 3322 - protein, 13 aa, Westerdykella ornata
CWFRGQPCSKVKR

SEQ ID NO: 3323 - protein, 14 aa, Xylona heveae
FCHLPGQGCSKAKR

SEQ ID NO: 3324 - protein, 14 aa, Xylona heveae
FCHLPGQGCSKLKR

SEQ ID NO: 3325 - protein, 14 aa, Xylona heveae
FCHLPGQGCSKVKR

SEQ ID NO: 3326 - protein, 13 aa, Zasmidium cellare
CSEPGGDCDVAKR

SEQ ID NO: 3327 - protein, 14 aa, Zasmidium cellare
FCGLPGEACSRVKR

SEQ ID NO: 3328 - protein, 14 aa, Zasmidium cellare
FCGVPGEACEVTKR

SEQ ID NO: 3329 - protein, 14 aa, Zasmidium cellare
WKCGVPGQACNKKR

SEQ ID NO: 3330 - protein, 14 aa, Zasmidium cellare
WKCGVPGQACNRKR

SEQ ID NO: 3331 - protein, 14 aa, Zasmidium cellare
WKCGVRGQACNKKR

SEQ ID NO: 3332 - protein, 14 aa, Zymoseptoria brevis
WCGAIGAPCAKAKR

SEQ ID NO: 3333 - protein, 14 aa, Zymoseptoria brevis
WCGAIGAPCAKDKR

SEQ ID NO: 3334 - protein, 13 aa, Zymoseptoria brevis
WCGAIGAPCAKRD

SEQ ID NO: 3335 - protein, 14 aa, Zymoseptoria brevis
WCGAIGAPCAKVKR

SEQ ID NO: 3336 - protein, 14 aa, Zymoseptoria brevis
WCGAIGAPCARVKR

SEQ ID NO: 3337 - protein, 14 aa, Zymoseptoria brevis
WCGALGAPCAKVKR

SEQ ID NO: 3338 - protein, 14 aa, Zymoseptoria tritici
WCGAIGAPCAKAKR

SEQ ID NO: 3339 - protein, 14 aa, Zymoseptoria tritici
WCGAIGAPCAKDKR

SEQ ID NO: 3340 - protein, 12 aa, Zymoseptoria tritici
WCGAIGAPCAKR

SEQ ID NO: 3341 - protein, 14 aa, Zymoseptoria tritici
WCGAIGAPCAKVKR

SEQ ID NO: 3342 - protein, 14 aa, Zymoseptoria tritici
WCGAIGAPCARVKR

SEQ ID NO: 3343 - protein, 14 aa, Zymoseptoria tritici
WCGALGAPCAKVKR

SEQ ID NO: 3344 - protein, 14 aa, Zymoseptoria tritici
WCGAIGAPCAKAKR

SEQ ID NO: 3345 - protein, 14 aa, Zymoseptoria tritici
WCGAIGAPCAKDKR

SEQ ID NO: 3346 - protein, 12 aa, Zymoseptoria tritici
WCGAIGAPCAKR

SEQ ID NO: 3347 - protein, 14 aa, Zymoseptoria tritici
WCGAIGAPCAKVKR

SEQ ID NO: 3348 - protein, 14 aa, Zymoseptoria tritici
WCGAIGAPCARVKR

SEQ ID NO: 3349 - protein, 14 aa, Zymoseptoria tritici
WCGALGAPCAKVKR

SEQ ID NO: 3350 - protein, 14 aa, Zymoseptoria tritici
WCGAIGAPCAKAKR

SEQ ID NO: 3351 - protein, 14 aa, Zymoseptoria tritici
WCGAIGAPCAKDKR

SEQ ID NO: 3352 - protein, 12 aa, Zymoseptoria tritici
WCGAIGAPCAKR

SEQ ID NO: 3353 - protein, 14 aa, Zymoseptoria tritici
WCGAIGAPCAKVKR

SEQ ID NO: 3354 - protein, 14 aa, Zymoseptoria tritici
WCGAIGAPCARVKR

SEQ ID NO: 3355 - protein, 14 aa, Zymoseptoria tritici
WCGALGAPCAKVKR

SEQ ID NO: 3356 - protein, 14 aa, Zymoseptoria tritici
WCGAIGAPCAKAKR

SEQ ID NO: 3357 - protein, 14 aa, Zymoseptoria tritici
WCGAIGAPCAKDKR

SEQ ID NO: 3358 - protein, 12 aa, Zymoseptoria tritici
WCGAIGAPCAKR

SEQ ID NO: 3359 - protein, 14 aa, Zymoseptoria tritici
WCGAIGAPCAKVKR

SEQ ID NO: 3360 - protein, 14 aa, Zymoseptoria tritici
WCGAIGAPCARVKR

SEQ ID NO: 3361 - protein, 14 aa, Zymoseptoria tritici
WCGALGAPCAKVKR

SEQ ID NO: 3362 - DNA, 39 bp, Aaosphaeria arxii
  source 1..39: mol_type = other DNA
tgcggcatgcccggccagccctgcgaccgtctcaagcgc

SEQ ID NO: 3363 - DNA, 39 bp, Aaosphaeria arxii
  source 1..39: mol_type = other DNA
tgccttttcgtaggccaatcatgctccgtcgccaaacgc

SEQ ID NO: 3364 - DNA, 39 bp, Aaosphaeria arxii
  source 1..39: mol_type = other DNA
tgcagatggcctggtcagccatgctccaaggacaagcgt

SEQ ID NO: 3365 - DNA, 39 bp, Aaosphaeria arxii
  source 1..39: mol_type = other DNA
tgccgctggccaggacagccttgctccaaggagaagcgt

SEQ ID NO: 3366 - DNA, 39 bp, Aaosphaeria arxii
  source 1..39: mol_type = other DNA
tgccgctggccaggacagccttgctccaagaagagggag

SEQ ID NO: 3367 - DNA, 39 bp, Aaosphaeria arxii
  source 1..39: mol_type = other DNA
tgcacctttggcgactccgtctgcagcaagatcaagcgc

SEQ ID NO: 3368 - DNA, 39 bp, Acremonium chrysogenum
  source 1..39: mol_type = other DNA
tgccaccgtcccggcggggagtgcttcaaggcgaagagg

SEQ ID NO: 3369 - DNA, 42 bp, Acremonium chrysogenum
  source 1..42: mol_type = other DNA
tggtgctacatagaaacttacgattgtcctcgtgcgaagcgc

SEQ ID NO: 3370 - DNA, 42 bp, Akanthomyces lecanii
  source 1..42: mol_type = other DNA
tggtgcatgagacctgcccagccctgctggaagctcaagcgc

SEQ ID NO: 3371 - DNA, 42 bp, Akanthomyces lecanii
  source 1..42: mol_type = other DNA
tggtgcatgaggccggcgcagccatgctggaagaccaggcgc

SEQ ID NO: 3372 - DNA, 42 bp, Amniculicola lignicola
  source 1..42: mol_type = other DNA
gcgcttggccttgccacagggttggcccgggaagcggcacca

SEQ ID NO: 3373 - DNA, 42 bp, Amniculicola lignicola
  source 1..42: mol_type = other DNA
acgcttgtccttgccacagggttggccagggaagcggcacca

SEQ ID NO: 3374 - DNA, 42 bp, Amniculicola lignicola
  source 1..42: mol_type = other DNA
gcgcttgttcttgccgcagggctggcccgggaagcggcacca

SEQ ID NO: 3375 - DNA, 39 bp, Amorphotheca resinae
  source 1..39: mol_type = other DNA
tgcggaaaggtcggacaaccctgcggaaaggccaagcgt

SEQ ID NO: 3376 - DNA, 39 bp, Amorphotheca resinae
  source 1..39: mol_type = other DNA
tgcgggaaggtcggacaaccctgcggaaagataaagcgt

SEQ ID NO: 3377 - DNA, 39 bp, Amorphotheca resinae
  source 1..39: mol_type = other DNA
tgcaaccttgtcggaggtgcatgctacgaagccaagcgc

SEQ ID NO: 3378 - DNA, 39 bp, Amorphotheca resinae; identical to SEQ ID NO: 3377
  source 1..39: mol_type = other DNA

SEQ ID NO: 3379 - DNA, 63 bp, Aplosporella prunicola
  source 1..63: mol_type = other DNA
tggaaggccccctggccgcgcttctgcttccgccccggccagccctgcaccaaggccaagcgg

SEQ ID NO: 3380 - DNA, 63 bp, Aplosporella prunicola
  source 1..63: mol_type = other DNA
tggaaggccccctggccccgcttctgcttccgccccggccagccctgcaccaaagtcaagcgg

SEQ ID NO: 3381 - DNA, 51 bp, Aplosporella prunicola
  source 1..51: mol_type = other DNA
tggccccgcttctgcttccgtcctggccagccgtgtacgaaggctaagagg

SEQ ID NO: 3382 - DNA, 42 bp, Aspergillus aculeatinus
  source 1..42: mol_type = other DNA
tggtgctatctccctggccagccttgtgccatgatgaagcgt

SEQ ID NO: 3383 - DNA, 42 bp, Aspergillus aculeatinus
  source 1..42: mol_type = other DNA
tggtgctacttgcctggccaaccatgccagaagatcaagcga

SEQ ID NO: 3384 - DNA, 42 bp, Aspergillus aculeatinus
  source 1..42: mol_type = other DNA
tggtgctatctccctggccagccttgcgccatgataaagcgt

SEQ ID NO: 3385 - DNA, 42 bp, Aspergillus aculeatinus
  source 1..42: mol_type = other DNA
tggtgctacttgccgggccaaccatgtcagaagatcaagcga

SEQ ID NO: 3386 - DNA, 42 bp, Aspergillus alliaceus
  source 1..42: mol_type = other DNA
acgcttaagcatgtagcagccctgagcgagccccgtgcaccg

SEQ ID NO: 3387 - DNA, 42 bp, Aspergillus alliaceus
  source 1..42: mol_type = other DNA
ccgcttaaacttgaggcatccttgaccaggcaaatgacacca

SEQ ID NO: 3388 - DNA, 42 bp, Aspergillus alliaceus; identical to SEQ ID NO: 3386
  source 1..42: mol_type = other DNA

SEQ ID NO: 3389 - DNA, 42 bp, Aspergillus alliaceus; identical to SEQ ID NO: 3387
  source 1..42: mol_type = other DNA

SEQ ID NO: 3390 - DNA, 42 bp, Aspergillus arachidicola
  source 1..42: mol_type = other DNA
tggtgcgccctacctgctcagggctgctacatgctgaaacgt

SEQ ID NO: 3391 - DNA, 42 bp, Aspergillus arachidicola
  source 1..42: mol_type = other DNA
tggtgtgccctgcctggtcagggatgtctcaaagctaagcgg

SEQ ID NO: 3392 - DNA, 42 bp, Aspergillus avenaceus
  source 1..42: mol_type = other DNA
cctctttactttatagcatccttgaccgggcccatggcacca

SEQ ID NO: 3393 - DNA, 42 bp, Aspergillus avenaceus
  source 1..42: mol_type = other DNA
acgcttgaacatgtagcaaccctgaccggggccatgacacca

SEQ ID NO: 3394 - DNA, 42 bp, Aspergillus awamori
  source 1..42: mol_type = other DNA
tggtgtgtcctgcctggccaaccttgcaacaagatcaagcgg

SEQ ID NO: 3395 - DNA, 42 bp, Aspergillus awamori
  source 1..42: mol_type = other DNA
tggtgtgtcctccctggccagccatgcaacatgatcaagcgt

SEQ ID NO: 3396 - DNA, 42 bp, Aspergillus bertholletiae
  source 1..42: mol_type = other DNA
tggtgtgccctgcctggtcaggggtgtcttaaagctaagcgt

SEQ ID NO: 3397 - DNA, 42 bp, Aspergillus bertholletiae
  source 1..42: mol_type = other DNA
tggtgtgcattgcccggccagggctgctacatgctgaaacgt

SEQ ID NO: 3398 - DNA, 42 bp, Aspergillus bombycis
  source 1..42: mol_type = other DNA
acgtttcagcatgtagcagccctgagcaggcagtgcgcacca

SEQ ID NO: 3399 - DNA, 42 bp, Aspergillus bombycis
  source 1..42: mol_type = other DNA
ccgcttagccttgagacatccctgaccaggaagggcacacca

SEQ ID NO: 3400 - DNA, 42 bp, Aspergillus brasiliensis
  source 1..42: mol_type = other DNA
tggtgtgtccttcctggtcagccttgcaacaagattaagcgg

SEQ ID NO: 3401 - DNA, 42 bp, Aspergillus brasiliensis; identical to SEQ ID NO: 3395
  source 1..42: mol_type = other DNA

SEQ ID NO: 3402 - DNA, 42 bp, Aspergillus brunneoviolaceus
  source 1..42: mol_type = other DNA
acgcttcatcatggcacaaggctggccagggagatagcacca

SEQ ID NO: 3403 - DNA, 42 bp, Aspergillus brunneoviolaceus
  source 1..42: mol_type = other DNA
tcgcttgatcttctggcatggttggccaggcaagtagcacca

SEQ ID NO: 3404 - DNA, 42 bp, Aspergillus campestris
  source 1..42: mol_type = other DNA
tcgcttagccttctggcacccttgaccggggaaatggcacca

SEQ ID NO: 3405 - DNA, 42 bp, Aspergillus campestris
  source 1..42: mol_type = other DNA
acgcttgagcatgtagcagccttggcccgggaagtggcacca

SEQ ID NO: 3406 - DNA, 42 bp, Aspergillus candidus
  source 1..42: mol_type = other DNA
tcgcttggccttctggcacccttgaccagggaaatggcacca

SEQ ID NO: 3407 - DNA, 42 bp, Aspergillus candidus
  source 1..42: mol_type = other DNA
acgcttgagcatgtagcagccttggccggggaagtgacacca

SEQ ID NO: 3408 - DNA, 42 bp, Aspergillus carbonarius
  source 1..42: mol_type = other DNA
ccgcttgatcttgttgcatggctggccgggcagattgcacca

SEQ ID NO: 3409 - DNA, 42 bp, Aspergillus carbonarius
  source 1..42: mol_type = other DNA
gcgcttgatcatgttgcatggctggccgggcagattgcacca

SEQ ID NO: 3410 - DNA, 42 bp, Aspergillus carbonarius; identical to SEQ ID NO: 3408
  source 1..42: mol_type = other DNA

SEQ ID NO: 3411 - DNA, 42 bp, Aspergillus carbonarius; identical to SEQ ID NO: 3409
  source 1..42: mol_type = other DNA

SEQ ID NO: 3412 - DNA, 42 bp, Aspergillus clavatus
  source 1..42: mol_type = other DNA
acgcttgaccttgtggcaaccctggccgggcaattcgcacca

SEQ ID NO: 3413 - DNA, 42 bp, Aspergillus clavatus
  source 1..42: mol_type = other DNA
gcgcttgatcatgtagcagccctggccagggagttcacacca

SEQ ID NO: 3414 - DNA, 42 bp, Aspergillus coremiiformis
  source 1..42: mol_type = other DNA
tggtgcaatgggcccggtcagggctgctacatgtttaagcgt

SEQ ID NO: 3415 - DNA, 42 bp, Aspergillus coremiiformis
  source 1..42: mol_type = other DNA
tggtgtcgcttgcctggccaaggatgccttaaagttaagcgg

SEQ ID NO: 3416 - DNA, 42 bp, Aspergillus costaricaensis
  source 1..42: mol_type = other DNA
acgcttgatcatgttgcatggctggccagggaggtgacacca

SEQ ID NO: 3417 - DNA, 42 bp, Aspergillus costaricaensis
  source 1..42: mol_type = other DNA
ccgcttgatcttgttgcaaggctgaccaggcaggacacacca

SEQ ID NO: 3418 - DNA, 42 bp, Aspergillus ellipticus
  source 1..42: mol_type = other DNA
ccgtttgattttgttgcatggctgaccgggcaagacacacca

SEQ ID NO: 3419 - DNA, 42 bp, Aspergillus ellipticus
  source 1..42: mol_type = other DNA
gcgtttcatcttattacatggctgaccgggaaggacacacca

SEQ ID NO: 3420 - DNA, 42 bp, Aspergillus eucalypticola; identical to SEQ ID NO: 3417
  source 1..42: mol_type = other DNA

SEQ ID NO: 3421 - DNA, 42 bp, Aspergillus eucalypticola
  source 1..42: mol_type = other DNA
acgcttgatcatgttgcatggctggccagggaggtaacacca

SEQ ID NO: 3422 - DNA, 42 bp, Aspergillus fijiensis
  source 1..42: mol_type = other DNA
tggtgctatctccctggtcagccttgtgccatgatgaagcgt

SEQ ID NO: 3423 - DNA, 42 bp, Aspergillus fijiensis; identical to SEQ ID NO: 3383
  source 1..42: mol_type = other DNA

SEQ ID NO: 3424 - DNA, 42 bp, Aspergillus fischeri
  source 1..42: mol_type = other DNA
tctcttcgccttggcgcaaccctgaccgggaagatggcacca

SEQ ID NO: 3425 - DNA, 42 bp, Aspergillus fischeri
  source 1..42: mol_type = other DNA
gcgcttaagcatgtagcaaccctgaccaggaagatggcacca

SEQ ID NO: 3426 - DNA, 42 bp, Aspergillus flavus
  source 1..42: mol_type = other DNA
tggtgtgccttgcctggtcagggatgcctcaaagctaagcgg

SEQ ID NO: 3427 - DNA, 42 bp, Aspergillus flavus
  source 1..42: mol_type = other DNA
tggtgctccctgcctgctcagggctgctacatgctgaaacgt

SEQ ID NO: 3428 - DNA, 42 bp, Aspergillus flavus
  source 1..42: mol_type = other DNA
ccgcttagctttgaggcatccctgaccaggcaaggcacacca

SEQ ID NO: 3429 - DNA, 42 bp, Aspergillus flavus
  source 1..42: mol_type = other DNA
acgtttcagcatgtagcagccctgagcaggcagggagcacca

SEQ ID NO: 3430 - DNA, 42 bp, Aspergillus flavus; identical to SEQ ID NO: 3426
  source 1..42: mol_type = other DNA

SEQ ID NO: 3431 - DNA, 42 bp, Aspergillus flavus; identical to SEQ ID NO: 3427
  source 1..42: mol_type = other DNA

SEQ ID NO: 3432 - DNA, 42 bp, Aspergillus flavus; identical to SEQ ID NO: 3428
  source 1..42: mol_type = other DNA

SEQ ID NO: 3433 - DNA, 42 bp, Aspergillus flavus; identical to SEQ ID NO: 3429
  source 1..42: mol_type = other DNA

SEQ ID NO: 3434 - DNA, 42 bp, Aspergillus flavus; identical to SEQ ID NO: 3428
  source 1..42: mol_type = other DNA

SEQ ID NO: 3435 - DNA, 42 bp, Aspergillus flavus; identical to SEQ ID NO: 3429
  source 1..42: mol_type = other DNA

SEQ ID NO: 3436 - DNA, 42 bp, Aspergillus flavus; identical to SEQ ID NO: 3426
  source 1..42: mol_type = other DNA

SEQ ID NO: 3437 - DNA, 42 bp, Aspergillus flavus; identical to SEQ ID NO: 3427
  source 1..42: mol_type = other DNA

SEQ ID NO: 3438 - DNA, 30 bp, Aspergillus fumigatiaffinis
  source 1..30: mol_type = other DNA
cgcgcatccaacgccagtagccttgcacca

SEQ ID NO: 3439 - DNA, 33 bp, Aspergillus fumigatiaffinis
  source 1..33: mol_type = other DNA
aagcgcgcatccaacgccagtagccttgcacca

SEQ ID NO: 3440 - DNA, 42 bp, Aspergillus fumigatiaffinis
  source 1..42: mol_type = other DNA
tggtgccatcttcccggtcagggttgcgccaaggcgaagaga

SEQ ID NO: 3441 - DNA, 42 bp, Aspergillus fumigatiaffinis
  source 1..42: mol_type = other DNA
tggtgccatcttcctggtcagggttgctacatgcttaagcgc

SEQ ID NO: 3442 - DNA, 42 bp, Aspergillus fumigatiaffinis; identical to SEQ ID NO: 3424
  source 1..42: mol_type = other DNA

SEQ ID NO: 3443 - DNA, 42 bp, Aspergillus fumigatiaffinis; identical to SEQ ID NO: 3425
  source 1..42: mol_type = other DNA

SEQ ID NO: 3444 - DNA, 18 bp, Aspergillus fumigatiaffinis
  source 1..18: mol_type = other DNA
accgggtatcaaacacca

SEQ ID NO: 3445 - DNA, 18 bp, Aspergillus fumigatiaffinis
  source 1..18: mol_type = other DNA
accgggtatcaaacacca

SEQ ID NO: 3446 - DNA, 42 bp, Aspergillus fumigatus; identical to SEQ ID NO: 3424
  source 1..42: mol_type = other DNA

SEQ ID NO: 3447 - DNA, 42 bp, Aspergillus fumigatus; identical to SEQ ID NO: 3425
  source 1..42: mol_type = other DNA

SEQ ID NO: 3448 - DNA, 42 bp, Aspergillus fumigatus; identical to SEQ ID NO: 3424
  source 1..42: mol_type = other DNA

SEQ ID NO: 3449 - DNA, 42 bp, Aspergillus fumigatus; identical to SEQ ID NO: 3425
  source 1..42: mol_type = other DNA

SEQ ID NO: 3450 - DNA, 42 bp, Aspergillus fumigatus; identical to SEQ ID NO: 3440
  source 1..42: mol_type = other DNA

SEQ ID NO: 3451 - DNA, 42 bp, Aspergillus fumigatus; identical to SEQ ID NO: 3441
  source 1..42: mol_type = other DNA

SEQ ID NO: 3452 - DNA, 42 bp, Aspergillus fumigatus; identical to SEQ ID NO: 3424
  source 1..42: mol_type = other DNA

SEQ ID NO: 3453 - DNA, 42 bp, Aspergillus fumigatus; identical to SEQ ID NO: 3425
  source 1..42: mol_type = other DNA

SEQ ID NO: 3454 - DNA, 42 bp, Aspergillus fumigatus; identical to SEQ ID NO: 3440
  source 1..42: mol_type = other DNA

SEQ ID NO: 3455 - DNA, 42 bp, Aspergillus fumigatus; identical to SEQ ID NO: 3441
  source 1..42: mol_type = other DNA

SEQ ID NO: 3456 - DNA, 42 bp, Aspergillus fumigatus; identical to SEQ ID NO: 3424
  source 1..42: mol_type = other DNA

SEQ ID NO: 3457 - DNA, 42 bp, Aspergillus fumigatus; identical to SEQ ID NO: 3425
  source 1..42: mol_type = other DNA

SEQ ID NO: 3458 - DNA, 42 bp, Aspergillus fumigatus; identical to SEQ ID NO: 3424
  source 1..42: mol_type = other DNA

SEQ ID NO: 3459 - DNA, 42 bp, Aspergillus fumigatus; identical to SEQ ID NO: 3425
  source 1..42: mol_type = other DNA

SEQ ID NO: 3460 - DNA, 42 bp, Aspergillus fumigatus; identical to SEQ ID NO: 3424
  source 1..42: mol_type = other DNA

SEQ ID NO: 3461 - DNA, 42 bp, Aspergillus fumigatus; identical to SEQ ID NO: 3425
  source 1..42: mol_type = other DNA

SEQ ID NO: 3462 - DNA, 42 bp, Aspergillus fumigatus; identical to SEQ ID NO: 3424
  source 1..42: mol_type = other DNA

SEQ ID NO: 3463 - DNA, 42 bp, Aspergillus fumigatus; identical to SEQ ID NO: 3425
  source 1..42: mol_type = other DNA

SEQ ID NO: 3464 - DNA, 42 bp, Aspergillus fumigatus; identical to SEQ ID NO: 3424
  source 1..42: mol_type = other DNA

SEQ ID NO: 3465 - DNA, 42 bp, Aspergillus fumigatus; identical to SEQ ID NO: 3425
  source 1..42: mol_type = other DNA

SEQ ID NO: 3466 - DNA, 42 bp, Aspergillus fumigatus; identical to SEQ ID NO: 3424
  source 1..42: mol_type = other DNA

SEQ ID NO: 3467 - DNA, 42 bp, Aspergillus fumigatus; identical to SEQ ID NO: 3425
  source 1..42: mol_type = other DNA

SEQ ID NO: 3468 - DNA, 42 bp, Aspergillus heteromorphus
  source 1..42: mol_type = other DNA
gcgcttcatcttatggcagggctggccggggaggacacacca

SEQ ID NO: 3469 - DNA, 42 bp, Aspergillus heteromorphus
  source 1..42: mol_type = other DNA
gcgcttgattttgttgcatggttgacctggcaaaacacacca

SEQ ID NO: 3470 - DNA, 42 bp, Aspergillus homomorphus
  source 1..42: mol_type = other DNA
tggtgctacctccccggccagccctgcgccatgatgaagcgt

SEQ ID NO: 3471 - DNA, 42 bp, Aspergillus homomorphus
  source 1..42: mol_type = other DNA
tggtgttacttgcctggccagccctgccagaagatcaaacga

SEQ ID NO: 3472 - DNA, 42 bp, Aspergillus ibericus
  source 1..42: mol_type = other DNA
ccgcttgattttggtgcatggctggccgggaagatagcacca

SEQ ID NO: 3473 - DNA, 42 bp, Aspergillus ibericus
  source 1..42: mol_type = other DNA
gcgtttgatcatggtgcacggctggccagggaggtaacacca

SEQ ID NO: 3474 - DNA, 42 bp, Aspergillus indologenus; identical to SEQ ID NO: 3402
  source 1..42: mol_type = other DNA

SEQ ID NO: 3475 - DNA, 42 bp, Aspergillus indologenus
  source 1..42: mol_type = other DNA
tcgcttgatcttctggcatggttggccaggcaggtagcacca

SEQ ID NO: 3476 - DNA, 42 bp, Aspergillus japonicus; identical to SEQ ID NO: 3382
  source 1..42: mol_type = other DNA

SEQ ID NO: 3477 - DNA, 42 bp, Aspergillus japonicus
  source 1..42: mol_type = other DNA
tggtgctacctgcctggccaaccatgccagaagatcaagcga

SEQ ID NO: 3478 - DNA, 42 bp, Aspergillus lentulus; identical to SEQ ID NO: 3440
  source 1..42: mol_type = other DNA

SEQ ID NO: 3479 - DNA, 42 bp, Aspergillus lentulus; identical to SEQ ID NO: 3441
  source 1..42: mol_type = other DNA

SEQ ID NO: 3480 - DNA, 42 bp, Aspergillus lentulus; identical to SEQ ID NO: 3440
  source 1..42: mol_type = other DNA

SEQ ID NO: 3481 - DNA, 42 bp, Aspergillus lentulus; identical to SEQ ID NO: 3441
  source 1..42: mol_type = other DNA

SEQ ID NO: 3482 - DNA, 42 bp, Aspergillus lentulus; identical to SEQ ID NO: 3424
  source 1..42: mol_type = other DNA

SEQ ID NO: 3483 - DNA, 42 bp, Aspergillus lentulus; identical to SEQ ID NO: 3425
  source 1..42: mol_type = other DNA

SEQ ID NO: 3484 - DNA, 42 bp, Aspergillus lentulus; identical to SEQ ID NO: 3424
  source 1..42: mol_type = other DNA

SEQ ID NO: 3485 - DNA, 42 bp, Aspergillus lentulus; identical to SEQ ID NO: 3425
  source 1..42: mol_type = other DNA

SEQ ID NO: 3486 - DNA, 42 bp, Aspergillus lentulus; identical to SEQ ID NO: 3440
  source 1..42: mol_type = other DNA

SEQ ID NO: 3487 - DNA, 42 bp, Aspergillus lentulus; identical to SEQ ID NO: 3441
  source 1..42: mol_type = other DNA

SEQ ID NO: 3488 - DNA, 42 bp, Aspergillus lentulus; identical to SEQ ID NO: 3424
  source 1..42: mol_type = other DNA

SEQ ID NO: 3489 - DNA, 42 bp, Aspergillus lentulus; identical to SEQ ID NO: 3425
  source 1..42: mol_type = other DNA

SEQ ID NO: 3490 - DNA, 42 bp, Aspergillus lentulus; identical to SEQ ID NO: 3424
  source 1..42: mol_type = other DNA

SEQ ID NO: 3491 - DNA, 42 bp, Aspergillus lentulus; identical to SEQ ID NO: 3425
  source 1..42: mol_type = other DNA

SEQ ID NO: 3492 - DNA, 42 bp, Aspergillus lentulus; identical to SEQ ID NO: 3440
  source 1..42: mol_type = other DNA

SEQ ID NO: 3493 - DNA, 42 bp, Aspergillus lentulus; identical to SEQ ID NO: 3441
  source 1..42: mol_type = other DNA

SEQ ID NO: 3494 - DNA, 42 bp, Aspergillus lentulus; identical to SEQ ID NO: 3425
  source 1..42: mol_type = other DNA

SEQ ID NO: 3495 - DNA, 42 bp, Aspergillus lentulus; identical to SEQ ID NO: 3425
  source 1..42: mol_type = other DNA

SEQ ID NO: 3496 - DNA, 42 bp, Aspergillus lentulus; identical to SEQ ID NO: 3440
  source 1..42: mol_type = other DNA

SEQ ID NO: 3497 - DNA, 42 bp, Aspergillus lentulus; identical to SEQ ID NO: 3441
  source 1..42: mol_type = other DNA

SEQ ID NO: 3498 - DNA, 42 bp, Aspergillus lentulus; identical to SEQ ID NO: 3425
  source 1..42: mol_type = other DNA

SEQ ID NO: 3499 - DNA, 42 bp, Aspergillus lentulus; identical to SEQ ID NO: 3425
  source 1..42: mol_type = other DNA

SEQ ID NO: 3500 - DNA, 42 bp, Aspergillus lentulus; identical to SEQ ID NO: 3424
  source 1..42: mol_type = other DNA

SEQ ID NO: 3501 - DNA, 42 bp, Aspergillus lentulus; identical to SEQ ID NO: 3425
  source 1..42: mol_type = other DNA

SEQ ID NO: 3502 - DNA, 42 bp, Aspergillus luchuensis
  source 1..42: mol_type = other DNA
tggtgtcatctccctggccagccatgcaacatgatcaagcgt

SEQ ID NO: 3503 - DNA, 42 bp, Aspergillus luchuensis
  source 1..42: mol_type = other DNA
tggtgtgtcctgcctggtcagccctgcaacaagatcaagcgg

SEQ ID NO: 3504 - DNA, 42 bp, Aspergillus luchuensis
  source 1..42: mol_type = other DNA
tggtgtcacctccctggccagccatgcaacatgatcaagcgt

SEQ ID NO: 3505 - DNA, 42 bp, Aspergillus luchuensis; identical to SEQ ID NO: 3503
  source 1..42: mol_type = other DNA

SEQ ID NO: 3506 - DNA, 42 bp, Aspergillus luchuensis; identical to SEQ ID NO: 3502
  source 1..42: mol_type = other DNA

SEQ ID NO: 3507 - DNA, 42 bp, Aspergillus luchuensis; identical to SEQ ID NO: 3503
  source 1..42: mol_type = other DNA

SEQ ID NO: 3508 - DNA, 42 bp, Aspergillus mulundensis
  source 1..42: mol_type = other DNA
acgcttggccttatggcagacctgtccgggccacctgcacca

SEQ ID NO: 3509 - DNA, 42 bp, Aspergillus mulundensis
  source 1..42: mol_type = other DNA
acgcttggacttatggcagacctgtccgggccacctgcacca

SEQ ID NO: 3510 - DNA, 42 bp, Aspergillus neoniger; identical to SEQ ID NO: 3417
  source 1..42: mol_type = other DNA

SEQ ID NO: 3511 - DNA, 42 bp, Aspergillus neoniger; identical to SEQ ID NO: 3421
  source 1..42: mol_type = other DNA

SEQ ID NO: 3512 - DNA, 42 bp, Aspergillus niger
  source 1..42: mol_type = other DNA
tggtgtgtcctgcctggccagccttgcaacaagatcaagcgg

SEQ ID NO: 3513 - DNA, 42 bp, Aspergillus niger; identical to SEQ ID NO: 3395
  source 1..42: mol_type = other DNA

SEQ ID NO: 3514 - DNA, 42 bp, Aspergillus niger; identical to SEQ ID NO: 3504
  source 1..42: mol_type = other DNA

SEQ ID NO: 3515 - DNA, 42 bp, Aspergillus niger
  source 1..42: mol_type = other DNA
tggtgtgtcctgcctggtcagccttgcaacaagatcaagcgg

SEQ ID NO: 3516 - DNA, 42 bp, Aspergillus niger
  source 1..42: mol_type = other DNA
ccgcttgatcttgttgcaaggctggccaggcaggacacacca

SEQ ID NO: 3517 - DNA, 42 bp, Aspergillus niger
  source 1..42: mol_type = other DNA
acgcttgatcatgttgcatgactggccagggaggacacacca

SEQ ID NO: 3518 - DNA, 42 bp, Aspergillus niger; identical to SEQ ID NO: 3512
  source 1..42: mol_type = other DNA

SEQ ID NO: 3519 - DNA, 42 bp, Aspergillus niger
  source 1..42: mol_type = other DNA
tggtgtgtcctccctggccagtcatgcaacatgatcaagcgt

SEQ ID NO: 3520 - DNA, 42 bp, Aspergillus niger; identical to SEQ ID NO: 3512
  source 1..42: mol_type = other DNA

SEQ ID NO: 3521 - DNA, 42 bp, Aspergillus niger; identical to SEQ ID NO: 3519
  source 1..42: mol_type = other DNA

SEQ ID NO: 3522 - DNA, 42 bp, Aspergillus niger; identical to SEQ ID NO: 3512
  source 1..42: mol_type = other DNA

SEQ ID NO: 3523 - DNA, 42 bp, Aspergillus niger; identical to SEQ ID NO: 3395
  source 1..42: mol_type = other DNA

SEQ ID NO: 3524 - DNA, 42 bp, Aspergillus niger; identical to SEQ ID NO: 3516
  source 1..42: mol_type = other DNA

SEQ ID NO: 3525 - DNA, 42 bp, Aspergillus niger
  source 1..42: mol_type = other DNA
acgcttgatcatgttgcatggctggccagggaggacacacca

SEQ ID NO: 3526 - DNA, 42 bp, Aspergillus nomiae
  source 1..42: mol_type = other DNA
ccgtttcagcatgtagcagccctgagcaggcagtgcacacca

SEQ ID NO: 3527 - DNA, 42 bp, Aspergillus nomiae
  source 1..42: mol_type = other DNA
cctcttagccttgagacatccctgaccaggcagggcacacca

SEQ ID NO: 3528 - DNA, 42 bp, Aspergillus novofumigatus; identical to SEQ ID NO: 3440
  source 1..42: mol_type = other DNA

SEQ ID NO: 3529 - DNA, 42 bp, Aspergillus novofumigatus; identical to SEQ ID NO: 3441
  source 1..42: mol_type = other DNA

SEQ ID NO: 3530 - DNA, 42 bp, Aspergillus phoenicis; identical to SEQ ID NO: 3512
  source 1..42: mol_type = other DNA

SEQ ID NO: 3531 - DNA, 42 bp, Aspergillus phoenicis; identical to SEQ ID NO: 3395
  source 1..42: mol_type = other DNA

SEQ ID NO: 3532 - DNA, 42 bp, Aspergillus piperis
  source 1..42: mol_type = other DNA
acgcttgatcatgttgcatggctggccagggagatgacacca

SEQ ID NO: 3533 - DNA, 42 bp, Aspergillus piperis
  source 1..42: mol_type = other DNA
ccgcttgatcttgttgcagggctgaccaggcaggacacacca

SEQ ID NO: 3534 - DNA, 42 bp, Aspergillus saccharolyticus; identical to SEQ ID NO: 3402
  source 1..42: mol_type = other DNA

SEQ ID NO: 3535 - DNA, 42 bp, Aspergillus saccharolyticus
  source 1..42: mol_type = other DNA
tcgcttgatcttttggcacggttgtccaggcaagtaacacca

SEQ ID NO: 3536 - DNA, 42 bp, Aspergillus sclerotialis
  source 1..42: mol_type = other DNA
tggtgctacttgcccggtcagggatgtaataagatgaagcgt

SEQ ID NO: 3537 - DNA, 42 bp, Aspergillus sclerotialis
  source 1..42: mol_type = other DNA
tggtgctatcttccaggccaaggttgctatatgctcaagcgc

SEQ ID NO: 3538 - DNA, 42 bp, Aspergillus sclerotiicarbonarius
  source 1..42: mol_type = other DNA
tggtgctatctgcccggccagccatgcaccaaaatcaagcgg

SEQ ID NO: 3539 - DNA, 42 bp, Aspergillus sclerotiicarbonarius
  source 1..42: mol_type = other DNA
tggtgttacctccctggccagccatgcaccatgatcaaacgt

SEQ ID NO: 3540 - DNA, 42 bp, Aspergillus taichungensis
  source 1..42: mol_type = other DNA
tggtgccatttccccggccaaggatgccagaaagccaagcgg

SEQ ID NO: 3541 - DNA, 42 bp, Aspergillus taichungensis
  source 1..42: mol_type = other DNA
tggtgtcacttcccgggccaaggctgctacatgctcaagcgt

SEQ ID NO: 3542 - DNA, 42 bp, Aspergillus terreus
  source 1..42: mol_type = other DNA
acgcttgaccttgagacagccctggcccggcagccagcacca

SEQ ID NO: 3543 - DNA, 42 bp, Aspergillus terreus
  source 1..42: mol_type = other DNA
ccgcttgagcatgtagcagccctggccggggagccagcacca

SEQ ID NO: 3544 - DNA, 42 bp, Aspergillus terreus; identical to SEQ ID NO: 3542
  source 1..42: mol_type = other DNA

SEQ ID NO: 3545 - DNA, 42 bp, Aspergillus terreus; identical to SEQ ID NO: 3543
  source 1..42: mol_type = other DNA

SEQ ID NO: 3546 - DNA, 42 bp, Aspergillus thermomutatus
  source 1..42: mol_type = other DNA
tggtgccaccttcctggtcagggctgcgccaaggcgaagaga

SEQ ID NO: 3547 - DNA, 42 bp, Aspergillus thermomutatus
  source 1..42: mol_type = other DNA
tggtgccagcttcctggtcagggttgctacatgctcaagcgc

SEQ ID NO: 3548 - DNA, 42 bp, Aspergillus tubingensis; identical to SEQ ID NO: 3416
  source 1..42: mol_type = other DNA

SEQ ID NO: 3549 - DNA, 42 bp, Aspergillus tubingensis; identical to SEQ ID NO: 3417
  source 1..42: mol_type = other DNA

SEQ ID NO: 3550 - DNA, 42 bp, Aspergillus tubingensis; identical to SEQ ID NO: 3504
  source 1..42: mol_type = other DNA

SEQ ID NO: 3551 - DNA, 42 bp, Aspergillus tubingensis; identical to SEQ ID NO: 3515
  source 1..42: mol_type = other DNA

SEQ ID NO: 3552 - DNA, 42 bp, Aspergillus turcosus
  source 1..42: mol_type = other DNA
tggtgccatcttcctggtcagggctgtgccaaggccaagaga

SEQ ID NO: 3553 - DNA, 42 bp, Aspergillus turcosus; identical to SEQ ID NO: 3441
  source 1..42: mol_type = other DNA

SEQ ID NO: 3554 - DNA, 42 bp, Aspergillus turcosus
  source 1..42: mol_type = other DNA
tctcttggccttggcacagccctgaccaggaagatggcacca

SEQ ID NO: 3555 - DNA, 42 bp, Aspergillus turcosus; identical to SEQ ID NO: 3425
  source 1..42: mol_type = other DNA

SEQ ID NO: 3556 - DNA, 42 bp, Aspergillus udagawae
  source 1..42: mol_type = other DNA
tctcttcgccttggcgcaaccttgaccaggaagatggcacca

SEQ ID NO: 3557 - DNA, 42 bp, Aspergillus udagawae
  source 1..42: mol_type = other DNA
acgcttaagcatgtagcaaccctggccaggaagatggcacca

SEQ ID NO: 3558 - DNA, 42 bp, Aspergillus udagawae; identical to SEQ ID NO: 3556
  source 1..42: mol_type = other DNA

SEQ ID NO: 3559 - DNA, 42 bp, Aspergillus udagawae
  source 1..42: mol_type = other DNA
acgcttaagcttgtagcaaccctgaccaggaagatggcacca

SEQ ID NO: 3560 - DNA, 42 bp, Aspergillus udagawae
  source 1..42: mol_type = other DNA
tggtgccatcttcctggtcaaggttgcgccaaggcgaagaga

SEQ ID NO: 3561 - DNA, 42 bp, Aspergillus udagawae
  source 1..42: mol_type = other DNA
tggtgccatcttcctggccagggttgctacatgcttaagcgt

SEQ ID NO: 3562 - DNA, 42 bp, Aspergillus udagawae; identical to SEQ ID NO: 3560
  source 1..42: mol_type = other DNA

SEQ ID NO: 3563 - DNA, 42 bp, Aspergillus udagawae
  source 1..42: mol_type = other DNA
tggtgccatcttcctggtcagggttgctacaagcttaagcgt

SEQ ID NO: 3564 - DNA, 42 bp, Aspergillus udagawae; identical to SEQ ID NO: 3556
  source 1..42: mol_type = other DNA

SEQ ID NO: 3565 - DNA, 42 bp, Aspergillus udagawae; identical to SEQ ID NO: 3559
  source 1..42: mol_type = other DNA

SEQ ID NO: 3566 - DNA, 42 bp, Aspergillus uvarum
  source 1..42: mol_type = other DNA
tggtgctacctccctggccagccttgtgccatgatgaagcgt

SEQ ID NO: 3567 - DNA, 42 bp, Aspergillus uvarum
  source 1..42: mol_type = other DNA
tggtgctacctgcctggtcaaccatgccagaagatcaagcga

SEQ ID NO: 3568 - DNA, 42 bp, Aspergillus vadensis; identical to SEQ ID NO: 3416
  source 1..42: mol_type = other DNA

SEQ ID NO: 3569 - DNA, 42 bp, Aspergillus vadensis; identical to SEQ ID NO: 3516
  source 1..42: mol_type = other DNA

SEQ ID NO: 3570 - DNA, 42 bp, Aspergillus violaceofuscus; identical to SEQ ID NO: 3402
  source 1..42: mol_type = other DNA

SEQ ID NO: 3571 - DNA, 42 bp, Aspergillus violaceofuscus; identical to SEQ ID NO: 3475
  source 1..42: mol_type = other DNA

SEQ ID NO: 3572 - DNA, 42 bp, Aspergillus welwitschiae; identical to SEQ ID NO: 3394
  source 1..42: mol_type = other DNA

SEQ ID NO: 3573 - DNA, 42 bp, Aspergillus welwitschiae; identical to SEQ ID NO: 3395
  source 1..42: mol_type = other DNA

SEQ ID NO: 3574 - DNA, 42 bp, Aulographum hederae
  source 1..42: mol_type = other DNA
ttctgtcatctccccggccaagtctgcggcaaagcaaagcgt

SEQ ID NO: 3575 - DNA, 42 bp, Aulographum hederae
  source 1..42: mol_type = other DNA
ttctgccatcttcccggtcaagtttgcggcaaggcgaggagg

SEQ ID NO: 3576 - DNA, 42 bp, Aulographum hederae
  source 1..42: mol_type = other DNA
ttctgtcatcttcccggtcaggtctgtggaaagctgaagcgt

SEQ ID NO: 3577 - DNA, 42 bp, Aulographum hederae
  source 1..42: mol_type = other DNA
ttctgccatctccccggccaagtctgtggcaaagtcaagcgc

SEQ ID NO: 3578 - DNA, 39 bp, Aulographum hederae
  source 1..39: mol_type = other DNA
ttctgccatctcccaggacgagtgtgtggcaagaagcgc

SEQ ID NO: 3579 - DNA, 42 bp, Beauveria bassiana
  source 1..42: mol_type = other DNA
tggtgcatgagacccggtcagccatgctggaaggctaagcgc

SEQ ID NO: 3580 - DNA, 42 bp, Beauveria bassiana
  source 1..42: mol_type = other DNA
tggtgcatgagacccggccagccatgctggaagctcaagcgc

SEQ ID NO: 3581 - DNA, 33 bp, Beauveria bassiana
  source 1..33: mol_type = other DNA
tggtgcatgagacccggccagccatgctggaag

SEQ ID NO: 3582 - DNA, 42 bp, Beauveria bassiana; identical to SEQ ID NO: 3579
  source 1..42: mol_type = other DNA

SEQ ID NO: 3583 - DNA, 42 bp, Beauveria bassiana; identical to SEQ ID NO: 3580
  source 1..42: mol_type = other DNA

SEQ ID NO: 3584 - DNA, 33 bp, Beauveria bassiana; identical to SEQ ID NO: 3581
  source 1..33: mol_type = other DNA

SEQ ID NO: 3585 - DNA, 42 bp, Beauveria bassiana; identical to SEQ ID NO: 3579
  source 1..42: mol_type = other DNA

SEQ ID NO: 3586 - DNA, 42 bp, Beauveria bassiana; identical to SEQ ID NO: 3580
  source 1..42: mol_type = other DNA

SEQ ID NO: 3587 - DNA, 33 bp, Beauveria bassiana; identical to SEQ ID NO: 3581
  source 1..33: mol_type = other DNA

SEQ ID NO: 3588 - DNA, 42 bp, Beauveria bassiana; identical to SEQ ID NO: 3579
  source 1..42: mol_type = other DNA

SEQ ID NO: 3589 - DNA, 42 bp, Beauveria bassiana; identical to SEQ ID NO: 3580
  source 1..42: mol_type = other DNA

SEQ ID NO: 3590 - DNA, 33 bp, Beauveria bassiana; identical to SEQ ID NO: 3581
  source 1..33: mol_type = other DNA

SEQ ID NO: 3591 - DNA, 42 bp, Beauveria brongniartii
  source 1..42: mol_type = other DNA
gcgcttggccttccagcatggttcaccgggtctcaggcacca

SEQ ID NO: 3592 - DNA, 42 bp, Beauveria brongniartii
  source 1..42: mol_type = other DNA
gcgcttgagcttccagcatggctggccgggtctcaagcacca

SEQ ID NO: 3593 - DNA, 33 bp, Beauveria brongniartii
  source 1..33: mol_type = other DNA
gcgcttccagcacttgcggttctgcatgcacca

SEQ ID NO: 3594 - DNA, 42 bp, Botryosphaeria dothidea
  source 1..42: mol_type = other DNA
ttctgccacgacgaaggccagccgtgctacaggttgaagcgt

SEQ ID NO: 3595 - DNA, 39 bp, Botryosphaeria dothidea
  source 1..39: mol_type = other DNA
tactgccacttccgcggctccgcctgtcctaagaagcgt

SEQ ID NO: 3596 - DNA, 39 bp, Botryosphaeria dothidea
  source 1..39: mol_type = other DNA
tactgccgcttccgtggctctgcttgtcccaagaagcgt

SEQ ID NO: 3597 - DNA, 39 bp, Botryosphaeria dothidea
  source 1..39: mol_type = other DNA
tactgccgcttccgtggctcagtctgtcccaagaagcgg

SEQ ID NO: 3598 - DNA, 42 bp, Botryosphaeria dothidea; identical to SEQ ID NO: 3594
  source 1..42: mol_type = other DNA

SEQ ID NO: 3599 - DNA, 39 bp, Botryosphaeria dothidea; identical to SEQ ID NO: 3595
  source 1..39: mol_type = other DNA

SEQ ID NO: 3600 - DNA, 39 bp, Botryosphaeria dothidea; identical to SEQ ID NO: 3596
  source 1..39: mol_type = other DNA

SEQ ID NO: 3601 - DNA, 39 bp, Botryosphaeria dothidea; identical to SEQ ID NO: 3597
  source 1..39: mol_type = other DNA

SEQ ID NO: 3602 - DNA, 39 bp, Botryotinia calthae
  source 1..39: mol_type = other DNA
tgtaacatggttggaggagcttgcttcgaggccaagaga

SEQ ID NO: 3603 - DNA, 33 bp, Botryotinia calthae
  source 1..33: mol_type = other DNA
tggtgcggacgccacggtcaaccatgcaagcgc

SEQ ID NO: 3604 - DNA, 30 bp, Botryotinia calthae
  source 1..30: mol_type = other DNA
tggtgcggacgcccaggacaaccatgtaag

SEQ ID NO: 3605 - DNA, 33 bp, Botryotinia calthae
  source 1..33: mol_type = other DNA
tggtgcggacgcccaggacaaccatgtaagcgc

SEQ ID NO: 3606 - DNA, 39 bp, Botryotinia calthae
  source 1..39: mol_type = other DNA
tggtgcggacgcccaggacaaccatgtaagcgcgaggct

SEQ ID NO: 3607 - DNA, 42 bp, Botryotinia calthae
  source 1..42: mol_type = other DNA
tggtgcggacgtcccggacaaccttgccgtgctgtcaagcgt

SEQ ID NO: 3608 - DNA, 42 bp, Botryotinia calthae
  source 1..42: mol_type = other DNA
tggtgcggacgtcctggtcaaccttgccgcaaggccaagaga

SEQ ID NO: 3609 - DNA, 42 bp, Botryotinia calthae
  source 1..42: mol_type = other DNA
tggtgcggacgtccaggacaaccttgccgcaagaacaagcgc

SEQ ID NO: 3610 - DNA, 33 bp, Botryotinia calthae
  source 1..33: mol_type = other DNA
tggtgcagacgcccaggacaaccatgcaagaga

SEQ ID NO: 3611 - DNA, 39 bp, Botryotinia convoluta
  source 1..39: mol_type = other DNA
tgcaacatggttggaggagcttgcttcgaggccaagaga

SEQ ID NO: 3612 - DNA, 30 bp, Botryotinia convoluta; identical to SEQ ID NO: 3604
  source 1..30: mol_type = other DNA

SEQ ID NO: 3613 - DNA, 33 bp, Botryotinia convoluta; identical to SEQ ID NO: 3605
  source 1..33: mol_type = other DNA

SEQ ID NO: 3614 - DNA, 42 bp, Botryotinia convoluta
  source 1..42: mol_type = other DNA
tggtgcggacgtcccggacaaccttgccgtgccgttaagcgt

SEQ ID NO: 3615 - DNA, 42 bp, Botryotinia convoluta
  source 1..42: mol_type = other DNA
tggtgcggacgcccaggacaaccttgccgcaaggccaagaga

SEQ ID NO: 3616 - DNA, 42 bp, Botryotinia convoluta
  source 1..42: mol_type = other DNA
tggtgcggacgcccaggacaaccttgccgcaagaacaagcgc

SEQ ID NO: 3617 - DNA, 39 bp, Botryotinia narcissicola
  source 1..39: mol_type = other DNA
tctcttggcctcgaagcaagctcctccaaccatgttgca

SEQ ID NO: 3618 - DNA, 39 bp, Botryotinia narcissicola
  source 1..39: mol_type = other DNA
acgcttctccttgcatggttgaccggggcgtccgcacca

SEQ ID NO: 3619 - DNA, 33 bp, Botryotinia narcissicola
  source 1..33: mol_type = other DNA
acgcttacatggttgaccgggacgtccgcacca

SEQ ID NO: 3620 - DNA, 42 bp, Botryotinia narcissicola
  source 1..42: mol_type = other DNA
acgcttgacggcacggcaaggttgtccaggacgtccacacca

SEQ ID NO: 3621 - DNA, 42 bp, Botryotinia narcissicola
  source 1..42: mol_type = other DNA
tctcttggccttgcggcaaggttgtccaggacgtccgcacca

SEQ ID NO: 3622 - DNA, 42 bp, Botryotinia narcissicola
  source 1..42: mol_type = other DNA
gcgcttgttcttgcggcaaggttgtcctgggcgtccgcacca

SEQ ID NO: 3623 - DNA, 39 bp, Botrytis cinerea; identical to SEQ ID NO: 3617
  source 1..39: mol_type = other DNA

SEQ ID NO: 3624 - DNA, 39 bp, Botrytis cinerea
  source 1..39: mol_type = other DNA
acgcttctccttgcatggctgtccggggcgtccgcacca

SEQ ID NO: 3625 - DNA, 33 bp, Botrytis cinerea
  source 1..33: mol_type = other DNA
acgcttacatggttgaccgggacgtccacacca

SEQ ID NO: 3626 - DNA, 33 bp, Botrytis cinerea
  source 1..33: mol_type = other DNA
acgcttgcatggttgtcctgggcgtccgcacca

SEQ ID NO: 3627 - DNA, 33 bp, Botrytis cinerea
  source 1..33: mol_type = other DNA
acgcttgcatggctgtccgggacgtccacacca

SEQ ID NO: 3628 - DNA, 42 bp, Botrytis cinerea
  source 1..42: mol_type = other DNA
acgcttgacggcacggcaaggttgtccggggcgtccgcacca

SEQ ID NO: 3629 - DNA, 42 bp, Botrytis cinerea
  source 1..42: mol_type = other DNA
tctcttggccttgcggcaaggttgtccgggacgtccgcacca

SEQ ID NO: 3630 - DNA, 42 bp, Botrytis cinerea
  source 1..42: mol_type = other DNA
gcgcttgttcttgcggcaaggttgtcctggacgtccgcacca

SEQ ID NO: 3631 - DNA, 39 bp, Botrytis cinerea; identical to SEQ ID NO: 3617
  source 1..39: mol_type = other DNA

SEQ ID NO: 3632 - DNA, 39 bp, Botrytis cinerea; identical to SEQ ID NO: 3624
  source 1..39: mol_type = other DNA

SEQ ID NO: 3633 - DNA, 33 bp, Botrytis cinerea
  source 1..33: mol_type = other DNA
acgcttacatggttgacctggacgtccacacca

SEQ ID NO: 3634 - DNA, 33 bp, Botrytis cinerea; identical to SEQ ID NO: 3626
  source 1..33: mol_type = other DNA

SEQ ID NO: 3635 - DNA, 33 bp, Botrytis cinerea; identical to SEQ ID NO: 3627
  source 1..33: mol_type = other DNA

SEQ ID NO: 3636 - DNA, 42 bp, Botrytis cinerea; identical to SEQ ID NO: 3628
  source 1..42: mol_type = other DNA

SEQ ID NO: 3637 - DNA, 42 bp, Botrytis cinerea; identical to SEQ ID NO: 3629
  source 1..42: mol_type = other DNA

SEQ ID NO: 3638 - DNA, 42 bp, Botrytis cinerea; identical to SEQ ID NO: 3630
  source 1..42: mol_type = other DNA

SEQ ID NO: 3639 - DNA, 39 bp, Botrytis cinerea; identical to SEQ ID NO: 3617
  source 1..39: mol_type = other DNA

SEQ ID NO: 3640 - DNA, 39 bp, Botrytis cinerea; identical to SEQ ID NO: 3624
  source 1..39: mol_type = other DNA

SEQ ID NO: 3641 - DNA, 33 bp, Botrytis cinerea; identical to SEQ ID NO: 3625
  source 1..33: mol_type = other DNA

SEQ ID NO: 3642 - DNA, 33 bp, Botrytis cinerea; identical to SEQ ID NO: 3626
  source 1..33: mol_type = other DNA

SEQ ID NO: 3643 - DNA, 33 bp, Botrytis cinerea; identical to SEQ ID NO: 3627
  source 1..33: mol_type = other DNA

SEQ ID NO: 3644 - DNA, 42 bp, Botrytis cinerea
  source 1..42: mol_type = other DNA
acgcttgacggcacggcaaggttgaccggggcgtccgcacca

SEQ ID NO: 3645 - DNA, 42 bp, Botrytis cinerea; identical to SEQ ID NO: 3629
  source 1..42: mol_type = other DNA

SEQ ID NO: 3646 - DNA, 42 bp, Botrytis cinerea; identical to SEQ ID NO: 3630
  source 1..42: mol_type = other DNA

SEQ ID NO: 3647 - DNA, 39 bp, Botrytis elliptica; identical to SEQ ID NO: 3611
  source 1..39: mol_type = other DNA

SEQ ID NO: 3648 - DNA, 42 bp, Botrytis elliptica
  source 1..42: mol_type = other DNA
tggtgcggacttccaggacaaccttgccgcaaggctaagaga

SEQ ID NO: 3649 - DNA, 33 bp, Botrytis elliptica
  source 1..33: mol_type = other DNA
tggtgcggacgcccaggacaaccatgcaagaga

SEQ ID NO: 3650 - DNA, 42 bp, Botrytis elliptica
  source 1..42: mol_type = other DNA
tggtgcggacgtcccggacaaccttgccgtgccgtcaagcgt

SEQ ID NO: 3651 - DNA, 42 bp, Botrytis elliptica
  source 1..42: mol_type = other DNA
tggtgcggacgccctggacaaccttgccgcaagaacaagcgc

SEQ ID NO: 3652 - DNA, 39 bp, Botrytis fragariae
  source 1..39: mol_type = other DNA
tctcttcgcctcgaagcaagctcctccaaccatgttgca

SEQ ID NO: 3653 - DNA, 39 bp, Botrytis fragariae
  source 1..39: mol_type = other DNA
acgcttctccttgcatggttgaccagggcgtccgcacca

SEQ ID NO: 3654 - DNA, 33 bp, Botrytis fragariae
  source 1..33: mol_type = other DNA
acgcttacatggttgaccagggcgtccacacca

SEQ ID NO: 3655 - DNA, 42 bp, Botrytis fragariae
  source 1..42: mol_type = other DNA
acgcttgacggcacggcaaggttgtccgggacgtccgcacca

SEQ ID NO: 3656 - DNA, 33 bp, Botrytis fragariae; identical to SEQ ID NO: 3654
  source 1..33: mol_type = other DNA

SEQ ID NO: 3657 - DNA, 39 bp, Botrytis fragariae; identical to SEQ ID NO: 3653
  source 1..39: mol_type = other DNA

SEQ ID NO: 3658 - DNA, 39 bp, Botrytis galanthina; identical to SEQ ID NO: 3617
  source 1..39: mol_type = other DNA

SEQ ID NO: 3659 - DNA, 39 bp, Botrytis galanthina
  source 1..39: mol_type = other DNA
acgcttctccttgcatggttgtccggggcgtccgcacca

SEQ ID NO: 3660 - DNA, 33 bp, Botrytis galanthina
  source 1..33: mol_type = other DNA
acgcttacatggttgtccgggacgtccacacca

SEQ ID NO: 3661 - DNA, 42 bp, Botrytis galanthina
  source 1..42: mol_type = other DNA
acgcttaacggcacggcaaggttgtccgggacgtccgcacca

SEQ ID NO: 3662 - DNA, 42 bp, Botrytis galanthina
  source 1..42: mol_type = other DNA
tctcttggccttgcggcaaggttgtcctggacgtccgcacca

SEQ ID NO: 3663 - DNA, 42 bp, Botrytis galanthina; identical to SEQ ID NO: 3622
  source 1..42: mol_type = other DNA

SEQ ID NO: 3664 - DNA, 39 bp, Botrytis hyacinthi; identical to SEQ ID NO: 3611
  source 1..39: mol_type = other DNA

SEQ ID NO: 3665 - DNA, 30 bp, Botrytis hyacinthi; identical to SEQ ID NO: 344
  source 1..30: mol_type = other DNA

SEQ ID NO: 3666 - DNA, 33 bp, Botrytis hyacinthi; identical to SEQ ID NO: 3649
  source 1..33: mol_type = other DNA

SEQ ID NO: 3667 - DNA, 42 bp, Botrytis hyacinthi
  source 1..42: mol_type = other DNA
tggtgcggacgtccaggacaaccttgccgcaaggccaagaga

SEQ ID NO: 3668 - DNA, 42 bp, Botrytis hyacinthi; identical to SEQ ID NO: 3616
  source 1..42: mol_type = other DNA

SEQ ID NO: 3669 - DNA, 27 bp, Botrytis hyacinthi
  source 1..27: mol_type = other DNA
tggtgcggacgcccaggacaaccatgc

SEQ ID NO: 3670 - DNA, 39 bp, Botrytis paeoniae; identical to SEQ ID NO: 3611
  source 1..39: mol_type = other DNA

SEQ ID NO: 3671 - DNA, 30 bp, Botrytis paeoniae; identical to SEQ ID NO: 3604
  source 1..30: mol_type = other DNA

SEQ ID NO: 3672 - DNA, 33 bp, Botrytis paeoniae; identical to SEQ ID NO: 3605
  source 1..33: mol_type = other DNA

SEQ ID NO: 3673 - DNA, 42 bp, Botrytis paeoniae
  source 1..42: mol_type = other DNA
tggtgtggacgtcccggacaaccttgtcgtgccgttaagcgt

SEQ ID NO: 3674 - DNA, 42 bp, Botrytis paeoniae
  source 1..42: mol_type = other DNA
tggtgcggacgtcccggacaaccttgccgcaaggccaagaga

SEQ ID NO: 3675 - DNA, 42 bp, Botrytis paeoniae; identical to SEQ ID NO: 3616
  source 1..42: mol_type = other DNA

SEQ ID NO: 3676 - DNA, 33 bp, Botrytis paeoniae
  source 1..33: mol_type = other DNA
tggtgcggacgctccggtcaaccatgtaaacgt

SEQ ID NO: 3677 - DNA, 33 bp, Botrytis porri
  source 1..33: mol_type = other DNA
tggtgcggacgccccggacaaccatgcaagcgt

SEQ ID NO: 3678 - DNA, 42 bp, Botrytis porri
  source 1..42: mol_type = other DNA
tggtgcggacgcccaggacaaccttgccgtgccgttaagcgt

SEQ ID NO: 3679 - DNA, 42 bp, Botrytis porri; identical to SEQ ID NO: 3615
  source 1..42: mol_type = other DNA

SEQ ID NO: 3680 - DNA, 39 bp, Botrytis tulipae; identical to SEQ ID NO: 3617
  source 1..39: mol_type = other DNA

SEQ ID NO: 3681 - DNA, 39 bp, Botrytis tulipae; identical to SEQ ID NO: 3659
  source 1..39: mol_type = other DNA

SEQ ID NO: 3682 - DNA, 33 bp, Botrytis tulipae; identical to SEQ ID NO: 3660
  source 1..33: mol_type = other DNA

SEQ ID NO: 3683 - DNA, 42 bp, Botrytis tulipae
  source 1..42: mol_type = other DNA
acgcttaacggcacggcaaggttgtccgggacgtccacacca

SEQ ID NO: 3684 - DNA, 42 bp, Botrytis tulipae; identical to SEQ ID NO: 3662
  source 1..42: mol_type = other DNA

SEQ ID NO: 3685 - DNA, 42 bp, Botrytis tulipae
  source 1..42: mol_type = other DNA
gcgcttgttcttgcggcaaggctgtcctgggcgtccgcacca

SEQ ID NO: 3686 - DNA, 30 bp, Cadophora sp.
  source 1..30: mol_type = other DNA; note = DSE1049
tgcggacacccagggcagccatgtggaaag

SEQ ID NO: 3687 - DNA, 33 bp, Cadophora sp.
  source 1..33: mol_type = other DNA; note = DSE1049
tgcggacacccagggcagccatgtggaaagcgt

SEQ ID NO: 3688 - DNA, 33 bp, Cenococcum geophilum
  source 1..33: mol_type = other DNA
gcagcgccaaacgccgttaccaagctcaagcgt

SEQ ID NO: 3689 - DNA, 39 bp, Cenococcum geophilum
  source 1..39: mol_type = other DNA
tgccatctcccaggccagtcttgcggcaagatcaagcgc

SEQ ID NO: 3690 - DNA, 42 bp, Cenococcum geophilum
  source 1..42: mol_type = other DNA
ggatgccatcttccaggtcaatcatgcggcaaagccaagcgt

SEQ ID NO: 3691 - DNA, 51 bp, Cenococcum geophilum
  source 1..51: mol_type = other DNA
tacatccacggatgccatcttccaggtcaatcatgcggcaaagccaagcgt

SEQ ID NO: 3692 - DNA, 27 bp, Chaetomium thermophilum
  source 1..27: mol_type = other DNA
tgcactgggcagtcatgctggaagcgc

SEQ ID NO: 3693 - DNA, 42 bp, Chaetomium thermophilum
  source 1..42: mol_type = other DNA
cggtgcatctccgaaggcggcgcttgctggcgggcgaagcgt

SEQ ID NO: 3694 - DNA, 39 bp, Chaetomium thermophilum
  source 1..39: mol_type = other DNA
tcctgcacccgtttcgtcggtgagtcctgctggaagcgc

SEQ ID NO: 3695 - DNA, 42 bp, Chaetomium thermophilum
  source 1..42: mol_type = other DNA
tggtgtgagatggctggccaagcctgcgataccgtcaagcgc

SEQ ID NO: 3696 - DNA, 39 bp, Chaetomium thermophilum
  source 1..39: mol_type = other DNA
tggtgtaaattgttcccggggcagccgtgctggaagcgg

SEQ ID NO: 3697 - DNA, 39 bp, Chaetomium thermophilum
  source 1..39: mol_type = other DNA
tggtgcacacggtttcccggccagccatgctggaagcgc

SEQ ID NO: 3698 - DNA, 39 bp, Chalara longipes
  source 1..39: mol_type = other DNA
tgcggtgcgagaggacaaccttgtggcaaggccaaaaga

SEQ ID NO: 3699 - DNA, 39 bp, Chalara longipes
  source 1..39: mol_type = other DNA
tgtggagctcgaggacaaccttgcggcaaagttaaacgt

SEQ ID NO: 3700 - DNA, 27 bp, Chlorociboria aeruginascens
  source 1..27: mol_type = other DNA
tgtgggaggcccggtcaggggtgcaaa

SEQ ID NO: 3701 - DNA, 42 bp, Chlorociboria aeruginascens
  source 1..42: mol_type = other DNA
tgtggcagacccggccaaggttgtaaagacaaattgaagaga

SEQ ID NO: 3702 - DNA, 27 bp, Chlorociboria aeruginascens
  source 1..27: mol_type = other DNA
tgtggcagacccggccaaggttgtaaa

SEQ ID NO: 3703 - DNA, 39 bp, Chlorociboria aeruginascens
  source 1..39: mol_type = other DNA
tgtggtcgtccaggccagggttgccgaaaagccaaaaga

SEQ ID NO: 3704 - DNA, 39 bp, Chlorociboria aeruginascens
  source 1..39: mol_type = other DNA
tgtggctcggagggacaaccctgcgcacgagtgaagaga

SEQ ID NO: 3705 - DNA, 39 bp, Chlorociboria aeruginascens
  source 1..39: mol_type = other DNA
tgtaacctcgttggaggtgcatgctatgaagcgaagcgt

SEQ ID NO: 3706 - DNA, 42 bp, Claviceps purpurea
  source 1..42: mol_type = other DNA
tggtgctggcgccctggtgaaggttgctggaaggctaagcgg

SEQ ID NO: 3707 - DNA, 42 bp, Claviceps purpurea
  source 1..42: mol_type = other DNA
tggtgctggcgccctggccagggatgctggaaggtcaagcgc

SEQ ID NO: 3708 - DNA, 30 bp, Coleophoma cylindrospora
  source 1..30: mol_type = other DNA
gcgtttacagggttgtccaagtctgccaca

SEQ ID NO: 3709 - DNA, 24 bp, Coleophoma cylindrospora
  source 1..24: mol_type = other DNA
gcacggttgacccatccgtccgca

SEQ ID NO: 3710 - DNA, 36 bp, Colletotrichum aenigma
  source 1..36: mol_type = other DNA
tggtgcaccaaacctggccagccctgctggaaacgc

SEQ ID NO: 3711 - DNA, 36 bp, Colletotrichum aenigma
  source 1..36: mol_type = other DNA
tggtgcaccgaacccggccagccctgctggaaacgc

SEQ ID NO: 3712 - DNA, 36 bp, Colletotrichum aenigma
  source 1..36: mol_type = other DNA
tggtgcaccaagcccgaccaaccgtgctggaagcgc

SEQ ID NO: 3713 - DNA, 36 bp, Colletotrichum aenigma
  source 1..36: mol_type = other DNA
tggtgcaccaaacccggccagccctgctggaagcgc

SEQ ID NO: 3714 - DNA, 36 bp, Colletotrichum aenigma
  source 1..36: mol_type = other DNA
tggtgcactcagcccgggcagccatgctggaagcgt

SEQ ID NO: 3715 - DNA, 36 bp, Colletotrichum fructicola
  source 1..36: mol_type = other DNA
tggtgcaacaaacccggccagccctgctggaaacgc

SEQ ID NO: 3716 - DNA, 36 bp, Colletotrichum fructicola
  source 1..36: mol_type = other DNA
tggtgcaccaagcccggccagccatgctggaagcgc

SEQ ID NO: 3717 - DNA, 36 bp, Colletotrichum fructicola
  source 1..36: mol_type = other DNA
gcgtttccagcagggctggccgggtttgttgcacca

SEQ ID NO: 3718 - DNA, 36 bp, Colletotrichum fructicola
  source 1..36: mol_type = other DNA
acgcttccagcatggctgtccgggcttagtgcacca

SEQ ID NO: 3719 - DNA, 36 bp, Colletotrichum fructicola; identical to SEQ ID NO: 3717
  source 1..36: mol_type = other DNA

SEQ ID NO: 3720 - DNA, 36 bp, Colletotrichum fructicola; identical to SEQ ID NO: 3718
  source 1..36: mol_type = other DNA

SEQ ID NO: 3721 - DNA, 36 bp, Colletotrichum fructicola; identical to SEQ ID NO: 3715
  source 1..36: mol_type = other DNA

SEQ ID NO: 3722 - DNA, 36 bp, Colletotrichum fructicola; identical to SEQ ID NO: 3716
  source 1..36: mol_type = other DNA

SEQ ID NO: 3723 - DNA, 36 bp, Colletotrichum fructicola; identical to SEQ ID NO: 3717
  source 1..36: mol_type = other DNA

SEQ ID NO: 3724 - DNA, 36 bp, Colletotrichum fructicola; identical to SEQ ID NO: 3718
  source 1..36: mol_type = other DNA

SEQ ID NO: 3725 - DNA, 36 bp, Colletotrichum fructicola; identical to SEQ ID NO: 3715
  source 1..36: mol_type = other DNA

SEQ ID NO: 3726 - DNA, 36 bp, Colletotrichum fructicola; identical to SEQ ID NO: 3716
  source 1..36: mol_type = other DNA

SEQ ID NO: 3727 - DNA, 36 bp, Colletotrichum fructicola; identical to SEQ ID NO: 3715
  source 1..36: mol_type = other DNA

SEQ ID NO: 3728 - DNA, 36 bp, Colletotrichum fructicola; identical to SEQ ID NO: 3716
  source 1..36: mol_type = other DNA

SEQ ID NO: 3729 - DNA, 36 bp, Colletotrichum gloeosporioides
  source 1..36: mol_type = other DNA
acgcttccagcagggctggccgggcttggtgcacca

SEQ ID NO: 3730 - DNA, 42 bp, Colletotrichum higginsianum
  source 1..42: mol_type = other DNA
tggtgccgcagcgtcggtcagccctgctggaaggtgaagcgc

SEQ ID NO: 3731 - DNA, 42 bp, Colletotrichum higginsianum
  source 1..42: mol_type = other DNA
tggtgcagccagccgggggcgccgtgctccgtcgccaagcga

SEQ ID NO: 3732 - DNA, 42 bp, Colletotrichum higginsianum; identical to SEQ ID NO: 3730
  source 1..42: mol_type = other DNA

SEQ ID NO: 3733 - DNA, 42 bp, Colletotrichum higginsianum; identical to SEQ ID NO: 3731
  source 1..42: mol_type = other DNA

SEQ ID NO: 3734 - DNA, 48 bp, Colletotrichum orchidophilum
  source 1..48: mol_type = other DNA
cgctgccaaagtatcggccagccttgctggaaggcgagagtcaagcgc

SEQ ID NO: 3735 - DNA, 42 bp, Colletotrichum orchidophilum
  source 1..42: mol_type = other DNA
tggtgccaaaacgtaggcgagccctgctggagggtgaagcgc

SEQ ID NO: 3736 - DNA, 39 bp, Colletotrichum orchidophilum
  source 1..39: mol_type = other DNA
tggtgccaaagcgtcggccagtcttgctggaaggacaag

SEQ ID NO: 3737 - DNA, 42 bp, Colletotrichum salicis
  source 1..42: mol_type = other DNA
tggtgcaataggaagctcattgggcagccgtgctggaagcgc

SEQ ID NO: 3738 - DNA, 42 bp, Colletotrichum salicis
  source 1..42: mol_type = other DNA
tggtgccaggccgtaggccaaggctgctggaaggtcaaacgc

SEQ ID NO: 3739 - DNA, 39 bp, Colletotrichum salicis
  source 1..39: mol_type = other DNA
tggtgccaagacatcaaccagccatgctggaagacaaag

SEQ ID NO: 3740 - DNA, 42 bp, Colletotrichum shisoi; identical to SEQ ID NO: 3730
  source 1..42: mol_type = other DNA

SEQ ID NO: 3741 - DNA, 42 bp, Colletotrichum shisoi
  source 1..42: mol_type = other DNA
tggtgccgcaccgtcggccagccgtgctggaaggctaagagg

SEQ ID NO: 3742 - DNA, 42 bp, Colletotrichum shisoi; identical to SEQ ID NO: 3731
  source 1..42: mol_type = other DNA

SEQ ID NO: 3743 - DNA, 36 bp, Colletotrichum siamense
  source 1..36: mol_type = other DNA
acgcttccagcagggctggccgggcttcgtgcacca

SEQ ID NO: 3744 - DNA, 36 bp, Colletotrichum siamense
  source 1..36: mol_type = other DNA
cctcttccagcacggctgcccaggcttcgtgcacca

SEQ ID NO: 3745 - DNA, 36 bp, Colletotrichum siamense; identical to SEQ ID NO: 3744
  source 1..36: mol_type = other DNA

SEQ ID NO: 3746 - DNA, 36 bp, Colletotrichum siamense
  source 1..36: mol_type = other DNA
gcgcttccagcaaggctggccgggcttcatgcacca

SEQ ID NO: 3747 - DNA, 36 bp, Colletotrichum siamense
  source 1..36: mol_type = other DNA
acgcttccagcatggctgtccgggcttggtacacca

SEQ ID NO: 3748 - DNA, 36 bp, Colletotrichum siamense
  source 1..36: mol_type = other DNA
tggtgcaccaagcccggtcagccctgctggaaacgc

SEQ ID NO: 3749 - DNA, 39 bp, Colletotrichum tanaceti
  source 1..39: mol_type = other DNA
tggtgccgcactgtcggccagccctgctggaaggagaag

SEQ ID NO: 3750 - DNA, 42 bp, Colletotrichum tanaceti
  source 1..42: mol_type = other DNA
tggtgccgcaccgtcggccagccctgctggaaggtgaagcgc

SEQ ID NO: 3751 - DNA, 42 bp, Colletotrichum tanaceti
  source 1..42: mol_type = other DNA
tggtgcagccagccgggggcgccgtgctccgtcgctaagcga

SEQ ID NO: 3752 - DNA, 36 bp, Colletotrichum tropicale
  source 1..36: mol_type = other DNA
tggtgcacaaagcccggacaaccatgctggaagcgt

SEQ ID NO: 3753 - DNA, 36 bp, Colletotrichum viniferum
  source 1..36: mol_type = other DNA
gcgtttccagcagggctggccgggctcggtgcacca

SEQ ID NO: 3754 - DNA, 36 bp, Colletotrichum viniferum; identical to SEQ ID NO: 3744
  source 1..36: mol_type = other DNA

SEQ ID NO: 3755 - DNA, 42 bp, Coniella lustricola
  source 1..42: mol_type = other DNA
tggtgcctcttccacggtgaagggtgctggaaggagaagcgc

SEQ ID NO: 3756 - DNA, 33 bp, Coniella lustricola
  source 1..33: mol_type = other DNA
tggtgcctcttccacggtgaagggtgctggaag

SEQ ID NO: 3757 - DNA, 33 bp, Coniella lustricola
  source 1..33: mol_type = other DNA
tggtgcctcttccacggtgagggctgctggaag

SEQ ID NO: 3758 - DNA, 42 bp, Coniochaeta ligniaria
  source 1..42: mol_type = other DNA
tggtgcaacatccgaggcgagccctgctggaagtccaagcgc

SEQ ID NO: 3759 - DNA, 24 bp, Coniochaeta pulveracea
  source 1..24: mol_type = other DNA
acgcttagatttccagcaaggtga

SEQ ID NO: 3760 - DNA, 42 bp, Coniochaeta pulveracea
  source 1..42: mol_type = other DNA
acgcttcgacttccaacatggctggcccttaaaggggcacca

SEQ ID NO: 3761 - DNA, 42 bp, Coniochaeta pulveracea
  source 1..42: mol_type = other DNA
ccgcttgttcttccagcatggctggcccttgtgggggcacca

SEQ ID NO: 3762 - DNA, 42 bp, Coniochaeta pulveracea
  source 1..42: mol_type = other DNA
gcgcttggatttccagcatggctcgccggggtgggggcacca

SEQ ID NO: 3763 - DNA, 42 bp, Coniochaeta pulveracea
  source 1..42: mol_type = other DNA
acgcttgttcttccagcatggctgacccgggtgggggcacca

SEQ ID NO: 3764 - DNA, 42 bp, Coniochaeta pulveracea
  source 1..42: mol_type = other DNA
acgcttgctcttccagcatggttggccgggatgggggcacca

SEQ ID NO: 3765 - DNA, 42 bp, Coniochaeta pulveracea
  source 1..42: mol_type = other DNA
ccgcttgttcttccagcacggctgacccttgtagggacacca

SEQ ID NO: 3766 - DNA, 42 bp, Coniochaeta pulveracea
  source 1..42: mol_type = other DNA
gcgcttcgacttccagcatggctgaccacggagtctgcacca

SEQ ID NO: 3767 - DNA, 42 bp, Coniochaeta sp.
  source 1..42: mol_type = other DNA; note = 2T2.1
gcgcttgctcttcttccagcacggctcgcccttggtggtgca

SEQ ID NO: 3768 - DNA, 39 bp, Coniochaeta sp.
  source 1..39: mol_type = other DNA; note = 2T2.1
gcgcttgttcttccagcagggctcgcccttggtggtgca

SEQ ID NO: 3769 - DNA, 42 bp, Coniochaeta sp.
  source 1..42: mol_type = other DNA; note = 2T2.1
gcgcttgttcttccagcacggctcgcccttgacggaacacca

SEQ ID NO: 3770 - DNA, 42 bp, Coniochaeta sp.
  source 1..42: mol_type = other DNA; note = 2T2.1
gcgcttggacttccagcacggctcgcccttgacggaacacca

SEQ ID NO: 3771 - DNA, 42 bp, Coniochaeta sp.
  source 1..42: mol_type = other DNA; note = 2T2.1
gcgcctgctcttccagcacggctcgcccttgacggaacacca

SEQ ID NO: 3772 - DNA, 39 bp, Coniochaeta sp.
  source 1..39: mol_type = other DNA; note = 2T2.1
tgcaccacgaaggtcgagccctgctggaagaacaagcga

SEQ ID NO: 3773 - DNA, 42 bp, Coniochaeta sp.
  source 1..42: mol_type = other DNA; note = 2T2.1
tggtgctccgtaaagggcgagccgtgctggaagtcgaagcgc

SEQ ID NO: 3774 - DNA, 42 bp, Coniochaeta sp.
  source 1..42: mol_type = other DNA; note = 2T2.1
tggtgttccgtcaagggcgagccatgctacaagcacaagcga

SEQ ID NO: 3775 - DNA, 42 bp, Coniochaeta sp.
  source 1..42: mol_type = other DNA; note = 2T2.1
tggtgctccgtcaagggcgagccgtgctacaagaacaaacgc

SEQ ID NO: 3776 - DNA, 42 bp, Coniochaeta sp.
  source 1..42: mol_type = other DNA; note = 2T2.1
tggtgctccgtcaagggcgagccctgctacaagtccaagcgc

SEQ ID NO: 3777 - DNA, 39 bp, Coniosporium apollinis
  source 1..39: mol_type = other DNA
acgcttggccttgtggcagggcttgtttggtgctccaca

SEQ ID NO: 3778 - DNA, 42 bp, Coniosporium apollinis
  source 1..42: mol_type = other DNA
gcgctttagcttgtcgcaggcctggttcggctgccagcagat

SEQ ID NO: 3779 - DNA, 54 bp, Coniosporium apollinis
  source 1..54: mol_type = other DNA
gcgcttcagccgagggcaaccttggcctgtcttgtggcagaaacgggagcccca

SEQ ID NO: 3780 - DNA, 54 bp, Coniosporium apollinis
  source 1..54: mol_type = other DNA
gcgcttcaccctaggacaaccttggcctgtcttgtggcagaagcgggagcccca

SEQ ID NO: 3781 - DNA, 30 bp, Cordyceps fumosorosea
  source 1..30: mol_type = other DNA
cttccagcacggctgcgcggggcggaagca

SEQ ID NO: 3782 - DNA, 33 bp, Cordyceps fumosorosea
  source 1..33: mol_type = other DNA
cttccagcacggctgcgcggggcggaagcacca

SEQ ID NO: 3783 - DNA, 33 bp, Cordyceps fumosorosea
  source 1..33: mol_type = other DNA
cttccagcagggctgcgcggggcggaagcacca

SEQ ID NO: 3784 - DNA, 42 bp, Cordyceps militaris
  source 1..42: mol_type = other DNA
gcgcttggccttccagcaaggctggccaggtctcaggcacca

SEQ ID NO: 3785 - DNA, 36 bp, Cordyceps militaris
  source 1..36: mol_type = other DNA
gcgcttccagcaaggctcgccaggtctcgtgcacca

SEQ ID NO: 3786 - DNA, 42 bp, Cordyceps militaris
  source 1..42: mol_type = other DNA
gcgcttgagcttccagcacggctggccgggtctcgtgcacca

SEQ ID NO: 3787 - DNA, 42 bp, Cryomyces minteri
  source 1..42: mol_type = other DNA
gcgcttggccttggagcaaccctgaccagggagatggcagaa

SEQ ID NO: 3788 - DNA, 42 bp, Cryomyces minteri
  source 1..42: mol_type = other DNA
acgcttgaccttggaacagccctggcctgggagatggcagaa

SEQ ID NO: 3789 - DNA, 45 bp, Cryphonectria parasitica
  source 1..45: mol_type = other DNA
gcgcttggaggcgtagcaggtgctggagccctcgaaggggcagaa

SEQ ID NO: 3790 - DNA, 42 bp, Cryphonectria parasitica
  source 1..42: mol_type = other DNA
acgcttctccttccagcaaccttcgccgtggaagaggcacca

SEQ ID NO: 3791 - DNA, 36 bp, Cryphonectria parasitica
  source 1..36: mol_type = other DNA
acgcttccaacagccctcgccgtggaagaggcacca

SEQ ID NO: 3792 - DNA, 33 bp, Cryphonectria parasitica
  source 1..33: mol_type = other DNA
cttccaacagccctcgccgtggaagaggcacca

SEQ ID NO: 3793 - DNA, 42 bp, Cytospora leucostoma
  source 1..42: mol_type = other DNA
tcgtgcgagcagcccggcgaggcgtgcttcaaggcgcgccgc

SEQ ID NO: 3794 - DNA, 33 bp, Cytospora leucostoma
  source 1..33: mol_type = other DNA
tggtgcctcctcaagggccagggctgttggaag

SEQ ID NO: 3795 - DNA, 39 bp, Delitschia confertaspora
  source 1..39: mol_type = other DNA
gcgcttaagcttctggcaagtggcatggccgaaggtgca

SEQ ID NO: 3796 - DNA, 30 bp, Delitschia confertaspora
  source 1..30: mol_type = other DNA
agagcaagactggccggggaagcggcagtt

SEQ ID NO: 3797 - DNA, 42 bp, Delitschia confertaspora
  source 1..42: mol_type = other DNA
acgcttctccttggagcaagactgtcccgggaagcggcagtt

SEQ ID NO: 3798 - DNA, 39 bp, Diaporthe ampelina
  source 1..39: mol_type = other DNA
tgcgagcagcccggcgaggcgtgccacaaggcccgctcc

SEQ ID NO: 3799 - DNA, 51 bp, Diaporthe ampelina
  source 1..51: mol_type = other DNA
ttttgccccttcggcggcgaggccggcagcgtgtgctacgcgtccaagcgc

SEQ ID NO: 3800 - DNA, 33 bp, Diaporthe ampelina
  source 1..33: mol_type = other DNA
tggtgcttctggaaaggccagggctgctggaag

SEQ ID NO: 3801 - DNA, 36 bp, Diaporthe ampelina
  source 1..36: mol_type = other DNA
tggtgcttctggaaaggccagggctgctggaagcgc

SEQ ID NO: 3802 - DNA, 36 bp, Diaporthe helianthi
  source 1..36: mol_type = other DNA
gcgggccttgttacaggcctcaccgggctcctcgca

SEQ ID NO: 3803 - DNA, 51 bp, Diaporthe helianthi
  source 1..51: mol_type = other DNA
ccgcttggaggcgtagcacacggagccggcctcgccgccaaaggggcagaa

SEQ ID NO: 3804 - DNA, 42 bp, Diaporthe helianthi
  source 1..42: mol_type = other DNA
acgcttggccttccagcagccctcgcccttccagaagcacca

SEQ ID NO: 3805 - DNA, 36 bp, Diaporthe helianthi
  source 1..36: mol_type = other DNA
acgcttccagcagccctcacccttccagaagcacca

SEQ ID NO: 3806 - DNA, 39 bp, Diplocarpon rosae
  source 1..39: mol_type = other DNA
tgcggacacccaggacagccatgtggcaaggctaagcgc

SEQ ID NO: 3807 - DNA, 39 bp, Diplocarpon rosae
  source 1..39: mol_type = other DNA
tgcggccaccccggtcagccatgcggcaaagtcaagcgc

SEQ ID NO: 3808 - DNA, 60 bp, Diplocarpon rosae
  source 1..60: mol_type = other DNA
tggactacgctcgatgcacgatgcaacctcgttggaggtgcatgctacgaggccaagcgt

SEQ ID NO: 3809 - DNA, 39 bp, Diplocarpon rosae
  source 1..39: mol_type = other DNA
tgcggacacccaggacaaccttgcggcaaggccaagcgt

SEQ ID NO: 3810 - DNA, 39 bp, Diplodia corticola
  source 1..39: mol_type = other DNA
tgctccggccctgccgacctttgcaccatggccaagcgc

SEQ ID NO: 3811 - DNA, 36 bp, Diplodia corticola
  source 1..36: mol_type = other DNA
ttctgcggccgtatcaggggccagccatgccacaag

SEQ ID NO: 3812 - DNA, 45 bp, Diplodia corticola
  source 1..45: mol_type = other DNA
ttctgcggccgtatcaggggccagccatgccacaagctcaagcgt

SEQ ID NO: 3813 - DNA, 33 bp, Dothistroma septosporum
  source 1..33: mol_type = other DNA
tgcactgcaccaggcattgcctgcgccaaacgt

SEQ ID NO: 3814 - DNA, 33 bp, Dothistroma septosporum
  source 1..33: mol_type = other DNA
tgcactgcaccaggcattgcatgcggcaaacgt

SEQ ID NO: 3815 - DNA, 33 bp, Dothistroma septosporum
  source 1..33: mol_type = other DNA
tgcacagtcccaggtcttgcttgcggtaagcga

SEQ ID NO: 3816 - DNA, 42 bp, Dothistroma septosporum
  source 1..42: mol_type = other DNA
ttctgcggtctccccggagaagcttgctctcgcgccaagcgt

SEQ ID NO: 3817 - DNA, 36 bp, Dothistroma septosporum
  source 1..36: mol_type = other DNA
cgctgcagtgctcccggcattggctgcgagaagcgc

SEQ ID NO: 3818 - DNA, 36 bp, Dothistroma septosporum
  source 1..36: mol_type = other DNA
agatgcactgttcctggtcttgcctgcggaaagcga

SEQ ID NO: 3819 - DNA, 33 bp, Drechmeria coniospora
  source 1..33: mol_type = other DNA
tggtgcacccgtcccggaagcggatgctggaag

SEQ ID NO: 3820 - DNA, 39 bp, Drechmeria coniospora
  source 1..39: mol_type = other DNA
tggtgcacccgtcccggaagcggatgctggaagaaacgc

SEQ ID NO: 3821 - DNA, 33 bp, Drechmeria coniospora; identical to SEQ ID NO: 3819
  source 1..33: mol_type = other DNA

SEQ ID NO: 3822 - DNA, 33 bp, Drechmeria coniospora
  source 1..33: mol_type = other DNA
cttccagcatccgcttccgggacgggtgcacca

SEQ ID NO: 3823 - DNA, 33 bp, Drechmeria coniospora
  source 1..33: mol_type = other DNA
cttccagcaaccacttccggggcgagtgcacca

SEQ ID NO: 3824 - DNA, 42 bp, Drechmeria coniospora
  source 1..42: mol_type = other DNA
ccgcttcaccttccagcagccgctgccgggacgagtgcacca

SEQ ID NO: 3825 - DNA, 39 bp, Drepanopeziza brunnea
  source 1..39: mol_type = other DNA
tgcggataccgcggacaaccttgccctaaggccaagcgc

SEQ ID NO: 3826 - DNA, 27 bp, Escovopsis weberi
  source 1..27: mol_type = other DNA
tgggccgtcgcctacaagagcaagcgc

SEQ ID NO: 3827 - DNA, 42 bp, Escovopsis weberi
  source 1..42: mol_type = other DNA
tggtgcatctaccccggccagggctgctggaaggccaagcgc

SEQ ID NO: 3828 - DNA, 42 bp, Escovopsis weberi
  source 1..42: mol_type = other DNA
tggtgcatgaaccccggccagggatgctggaaggtcaagcgc

SEQ ID NO: 3829 - DNA, 33 bp, Escovopsis weberi
  source 1..33: mol_type = other DNA
tggtgcaccaaccccggccagggctgctggaag

SEQ ID NO: 3830 - DNA, 42 bp, Escovopsis weberi
  source 1..42: mol_type = other DNA
tggtgcaccaaccccggccagggctgctggaagaagaagcgc

SEQ ID NO: 3831 - DNA, 33 bp, Escovopsis weberi
  source 1..33: mol_type = other DNA
tggtgcaccaacccgggccagggctgctggaag

SEQ ID NO: 3832 - DNA, 36 bp, Escovopsis weberi
  source 1..36: mol_type = other DNA
tggtgcaccaaccccggccagggctgctggaagcgt

SEQ ID NO: 3833 - DNA, 33 bp, Gaeumannomyces tritici
  source 1..33: mol_type = other DNA
gcgcttccagcagctctggccgcggtactggca

SEQ ID NO: 3834 - DNA, 42 bp, Gaeumannomyces tritici
  source 1..42: mol_type = other DNA
gcgcttggtcttcttccagcagggctggccgcggtacgtgca

SEQ ID NO: 3835 - DNA, 42 bp, Gaeumannomyces tritici
  source 1..42: mol_type = other DNA
ccgcttgacctgccagcagccctggccctcggcgccgcagaa

SEQ ID NO: 3836 - DNA, 36 bp, Gaeumannomyces tritici
  source 1..36: mol_type = other DNA
gcgcttccagcacgactggccgcggaaccggcagcc

SEQ ID NO: 3837 - DNA, 36 bp, Gaeumannomyces tritici
  source 1..36: mol_type = other DNA
gcgcttccagcaggactggccgcggtggcggcagcc

SEQ ID NO: 3838 - DNA, 36 bp, Gaeumannomyces tritici
  source 1..36: mol_type = other DNA
gcgcttccagcagctctggccgcggttgcggcagcc

SEQ ID NO: 3839 - DNA, 36 bp, Gaeumannomyces tritici
  source 1..36: mol_type = other DNA
gcgcttccagcagctctggccgcggtaccggcagcc

SEQ ID NO: 3840 - DNA, 42 bp, Gaeumannomyces tritici
  source 1..42: mol_type = other DNA
gcgcttggccacggcgcaggcgttaccggcctcgtggcacca

SEQ ID NO: 3841 - DNA, 21 bp, Glarea lozoyensis
  source 1..21: mol_type = other DNA
cggctgtccatgtcgaataca

SEQ ID NO: 3842 - DNA, 18 bp, Glarea lozoyensis
  source 1..18: mol_type = other DNA
ttgtccatgacgctggca

SEQ ID NO: 3843 - DNA, 21 bp, Glarea lozoyensis
  source 1..21: mol_type = other DNA
ttgtccatgacgctggcattg

SEQ ID NO: 3844 - DNA, 21 bp, Glarea lozoyensis
  source 1..21: mol_type = other DNA
cggctgtccatgtcgaataca

SEQ ID NO: 3845 - DNA, 15 bp, Glarea lozoyensis
  source 1..15: mol_type = other DNA
gccgtgccgttggca

SEQ ID NO: 3846 - DNA, 21 bp, Glarea lozoyensis
  source 1..21: mol_type = other DNA
ttgtccatgacgctggcattg

SEQ ID NO: 3847 - DNA, 33 bp, Glonium stellatum
  source 1..33: mol_type = other DNA
gctgaaccaaacgccgttaccaaactcaagcga

SEQ ID NO: 3848 - DNA, 27 bp, Glonium stellatum
  source 1..27: mol_type = other DNA
tgccatctcccgggccaatcttgccct

SEQ ID NO: 3849 - DNA, 42 bp, Grosmannia clavigera
  source 1..42: mol_type = other DNA
gcgcttcaccttccagcaggcctggccgtaccactggcacca

SEQ ID NO: 3850 - DNA, 36 bp, Grosmannia clavigera
  source 1..36: mol_type = other DNA
gcgcttccagcagccctggccgtaccactggcacca

SEQ ID NO: 3851 - DNA, 39 bp, Helotiales sp.
  source 1..39: mol_type = other DNA; note = DMI-Dod-QoI
acgcttggccttgccacacggctgtcccgggtaaccaca

SEQ ID NO: 3852 - DNA, 39 bp, Helotiales sp.
  source 1..39: mol_type = other DNA; note = DMI-Dod-QoI
tctctttagcttgccacatggctggcctgggtatccgca

SEQ ID NO: 3853 - DNA, 39 bp, Helotiales sp.
  source 1..39: mol_type = other DNA; note = DMI-Dod-QoI
acgcttgactttgccgcaaggttggccggggtatccgca

SEQ ID NO: 3854 - DNA, 39 bp, Hyaloscypha bicolor E
  source 1..39: mol_type = other DNA
tgcggagcgagaggacaaccttgtggcaaggccaagaga

SEQ ID NO: 3855 - DNA, 39 bp, Hyaloscypha bicolor E
  source 1..39: mol_type = other DNA
tgtggagctcgaggacaaccttgcggcaaagtcaagcgt

SEQ ID NO: 3856 - DNA, 57 bp, Hyaloscypha hepaticicola
  source 1..57: mol_type = other DNA
tgggataatgattggggttgtggagagcgtggacaaccttgcggcaaagtcaagcgc

SEQ ID NO: 3857 - DNA, 51 bp, Hyaloscypha hepaticicola
  source 1..51: mol_type = other DNA
tgggattggggatgtggagagagaggtcaaccttgtggcaaagccaagaga

SEQ ID NO: 3858 - DNA, 45 bp, Hyaloscypha hepaticicola
  source 1..45: mol_type = other DNA
tggggatggggagagcgaggccagccttgcggaaaagcgaagcgt

SEQ ID NO: 3859 - DNA, 39 bp, Lachnellula hyalina
  source 1..39: mol_type = other DNA
gcgcttctccttccagcagccttgtccacgagctccaca

SEQ ID NO: 3860 - DNA, 39 bp, Lachnellula hyalina
  source 1..39: mol_type = other DNA
gcgcttgattttccagcagccttggccgcgggcaccgca

SEQ ID NO: 3861 - DNA, 39 bp, Lachnellula hyalina
  source 1..39: mol_type = other DNA
gcgcttttgcttccagcagccttgaccacgggcaccaca

SEQ ID NO: 3862 - DNA, 39 bp, Lachnellula hyalina
  source 1..39: mol_type = other DNA
gcgcttaaccttccagcatccctggcctcgtgctccaca

SEQ ID NO: 3863 - DNA, 42 bp, Lachnellula hyalina
  source 1..42: mol_type = other DNA
gcgcttgattttccagcagccttggccgcgggcaccgcaacc

SEQ ID NO: 3864 - DNA, 36 bp, Lachnellula occidentalis
  source 1..36: mol_type = other DNA
tctcttctttgggcatccttggcctcgggcaccgca

SEQ ID NO: 3865 - DNA, 39 bp, Lachnellula occidentalis
  source 1..39: mol_type = other DNA
acgcttctccttccagcaaccttgaccacgggcaccgca

SEQ ID NO: 3866 - DNA, 39 bp, Lachnellula occidentalis
  source 1..39: mol_type = other DNA
gcgcttgaccttccagcatccctggcctcgtgctccgca

SEQ ID NO: 3867 - DNA, 39 bp, Lachnellula subtilissima
  source 1..39: mol_type = other DNA
acgcttctccttccagcagccttgtccacgagctccgca

SEQ ID NO: 3868 - DNA, 39 bp, Lachnellula subtilissima
  source 1..39: mol_type = other DNA
tcgcttgatcttccagcatccctgtcctcgtgctccgca

SEQ ID NO: 3869 - DNA, 39 bp, Lachnellula subtilissima; identical to SEQ ID NO: 3862
  source 1..39: mol_type = other DNA

SEQ ID NO: 3870 - DNA, 18 bp, Lachnellula subtilissima
  source 1..18: mol_type = other DNA
gcgcttgattttccaaca

SEQ ID NO: 3871 - DNA, 39 bp, Lachnellula suecica
  source 1..39: mol_type = other DNA
tgtggagcgcgcggacagggctgctacaaggcgaagaga

SEQ ID NO: 3872 - DNA, 39 bp, Lachnellula suecica
  source 1..39: mol_type = other DNA
tgcggtgctcggggccagggttgctacaaggagaagcgt

SEQ ID NO: 3873 - DNA, 39 bp, Lachnellula suecica
  source 1..39: mol_type = other DNA
tgcggagccagaggccagggatgctacaagaacaagaga

SEQ ID NO: 3874 - DNA, 42 bp, Lachnellula suecica
  source 1..42: mol_type = other DNA
ggctgcggtgccagaggccaaggctgctacaagatcaagcgc

SEQ ID NO: 3875 - DNA, 39 bp, Lachnellula willkommii
  source 1..39: mol_type = other DNA
gcgcttctccttccagcaaccttgaccacgggcaccgca

SEQ ID NO: 3876 - DNA, 39 bp, Lachnellula willkommii
  source 1..39: mol_type = other DNA
acgcttgatcttccagcagccctgtcctcgtgctccgca

SEQ ID NO: 3877 - DNA, 39 bp, Lachnellula willkommii; identical to SEQ ID NO: 3862
  source 1..39: mol_type = other DNA

SEQ ID NO: 3878 - DNA, 42 bp, Lachnellula willkommii; identical to SEQ ID NO: 3863
  source 1..42: mol_type = other DNA

SEQ ID NO: 3879 - DNA, 42 bp, Lasallia pustulata
  source 1..42: mol_type = other DNA
acgcttagccttagagcagatctcgcccgggcggtaacagaa

SEQ ID NO: 3880 - DNA, 42 bp, Lasallia pustulata
  source 1..42: mol_type = other DNA
gcgcttgagcttggagcagatctcaccagggcgatagcagaa

SEQ ID NO: 3881 - DNA, 42 bp, Lasallia pustulata
  source 1..42: mol_type = other DNA
gcgcttggtcttggagcaaatctcgccggggcggtagcagaa

SEQ ID NO: 3882 - DNA, 42 bp, Lasallia pustulata
  source 1..42: mol_type = other DNA
gcgcttggccttggagcagatctcgccggggcggtagcagaa

SEQ ID NO: 3883 - DNA, 42 bp, Lasallia pustulata; identical to SEQ ID NO: 3880
  source 1..42: mol_type = other DNA

SEQ ID NO: 3884 - DNA, 42 bp, Lasallia pustulata; identical to SEQ ID NO: 3881
  source 1..42: mol_type = other DNA

SEQ ID NO: 3885 - DNA, 42 bp, Lasallia pustulata
  source 1..42: mol_type = other DNA
acgcttggccttggagcagatctcgccccggcggtaacagaa

SEQ ID NO: 3886 - DNA, 39 bp, Lasiodiplodia theobromae
  source 1..39: mol_type = other DNA
acgcttggccatggtgcagaggtcggcagggccggagca

SEQ ID NO: 3887 - DNA, 42 bp, Lasiodiplodia theobromae
  source 1..42: mol_type = other DNA
acgcttcttgtgacagggctgaccgcggatgcggccacagaa

SEQ ID NO: 3888 - DNA, 45 bp, Lasiodiplodia theobromae
  source 1..45: mol_type = other DNA
acgcttgagcttgtggcagggctggccgcggatacgaccgcaaaa

SEQ ID NO: 3889 - DNA, 39 bp, Lasiodiplodia theobromae; identical to SEQ ID NO: 3886
  source 1..39: mol_type = other DNA

SEQ ID NO: 3890 - DNA, 42 bp, Lasiodiplodia theobromae; identical to SEQ ID NO: 3887
  source 1..42: mol_type = other DNA

SEQ ID NO: 3891 - DNA, 45 bp, Lasiodiplodia theobromae; identical to SEQ ID NO: 3888
  source 1..45: mol_type = other DNA

SEQ ID NO: 3892 - DNA, 39 bp, Letharia columbiana
  source 1..39: mol_type = other DNA
tgtcacgcccctggagcgccctgctcgaaagccaagcgt

SEQ ID NO: 3893 - DNA, 42 bp, Letharia columbiana
  source 1..42: mol_type = other DNA
ttctgctgggaagcaggagaaccctgctccaaactcaagcgc

SEQ ID NO: 3894 - DNA, 42 bp, Letharia columbiana
  source 1..42: mol_type = other DNA
ttctgttacctcgctggtgagccgtgctcgaaagccaaacgt

SEQ ID NO: 3895 - DNA, 51 bp, Letharia columbiana
  source 1..51: mol_type = other DNA
tggcacggacactgttaccgggacgaccaaccatgctccaagctgaagcgt

SEQ ID NO: 3896 - DNA, 51 bp, Letharia columbiana
  source 1..51: mol_type = other DNA
tggcatggatcctgctggcctgccggagaaccctgttccaagcaaaagcgt

SEQ ID NO: 3897 - DNA, 39 bp, Lindgomyces ingoldianus
  source 1..39: mol_type = other DNA
gcgcttaatcttctcgcaaatctcgtcaccaaatgcaca

SEQ ID NO: 3898 - DNA, 39 bp, Lindgomyces ingoldianus
  source 1..39: mol_type = other DNA
acgcttagccttagagcagggctggccgacgagcctgca

SEQ ID NO: 3899 - DNA, 39 bp, Lindgomyces ingoldianus
  source 1..39: mol_type = other DNA
acgcttttgcttggagcaaggctgtccgactagacggca

SEQ ID NO: 3900 - DNA, 33 bp, Lindgomyces ingoldianus
  source 1..33: mol_type = other DNA
acgcttggagcatggctgaccaacaagacggca

SEQ ID NO: 3901 - DNA, 36 bp, Lindgomyces ingoldianus
  source 1..36: mol_type = other DNA
acgcttggagcatggctgaccaacaagacggcaacg

SEQ ID NO: 3902 - DNA, 42 bp, Lindgomyces ingoldianus
  source 1..42: mol_type = other DNA
acgcttgagacggtcacacggctggccgggcatgccgcacga

SEQ ID NO: 3903 - DNA, 42 bp, Lineolata rhizophorae
  source 1..42: mol_type = other DNA
ttctgccatctgcccggtcagagctgctccaaggctaagcgt

SEQ ID NO: 3904 - DNA, 42 bp, Lineolata rhizophorae
  source 1..42: mol_type = other DNA
ttctgccaccttccgggccagagctgctccaaagagaagcgt

SEQ ID NO: 3905 - DNA, 42 bp, Lineolata rhizophorae
  source 1..42: mol_type = other DNA
ttttgccatctccccggtcagagttgctccaagacccgccgc

SEQ ID NO: 3906 - DNA, 42 bp, Lineolata rhizophorae
  source 1..42: mol_type = other DNA
ttctgccatcttccgggccaaagctgctccaaggttaagcgt

SEQ ID NO: 3907 - DNA, 45 bp, Lineolata rhizophorae
  source 1..45: mol_type = other DNA
tactgccacttgcctgggcaaagctgttccgagaaggagaagcgt

SEQ ID NO: 3908 - DNA, 42 bp, Lophiostoma macrostomum
  source 1..42: mol_type = other DNA
acgcttcgccttgccacagggctgtccacggtagtggcagaa

SEQ ID NO: 3909 - DNA, 39 bp, Lophiotrema nucula
  source 1..39: mol_type = other DNA
tgtggcatgccaggccagccatgtgaccgtctcaagcgt

SEQ ID NO: 3910 - DNA, 39 bp, Lophiotrema nucula
  source 1..39: mol_type = other DNA
tgcctgttcgtcggccagtcctgctctgtcgccaagcgt

SEQ ID NO: 3911 - DNA, 39 bp, Lophiotrema nucula
  source 1..39: mol_type = other DNA
tgtcagttcagcgacgccacttgccagaagatcaagcgc

SEQ ID NO: 3912 - DNA, 39 bp, Lophiotrema nucula
  source 1..39: mol_type = other DNA
tgccgcttccccggccagccatgctccaaggagaagcgt

SEQ ID NO: 3913 - DNA, 36 bp, Lophiotrema nucula
  source 1..36: mol_type = other DNA
tgccgattcccgggccagccatgctccaagaagcgt

SEQ ID NO: 3914 - DNA, 39 bp, Lophium mytilinum
  source 1..39: mol_type = other DNA
acgcttgtccttgctgcaagactggcctgggagatggca

SEQ ID NO: 3915 - DNA, 39 bp, Lophium mytilinum
  source 1..39: mol_type = other DNA
acgcttttccttggagcaagattgaccggggagatggca

SEQ ID NO: 3916 - DNA, 39 bp, Lophium mytilinum
  source 1..39: mol_type = other DNA
acgcttggtcttgctgcaagattggccgggaagatggca

SEQ ID NO: 3917 - DNA, 45 bp, Lophium mytilinum
  source 1..45: mol_type = other DNA
gcgcttgtccttgctgcaagactggcccggaagatggcaacccca

SEQ ID NO: 3918 - DNA, 39 bp, Madurella mycetomatis
  source 1..39: mol_type = other DNA
atgtgcctccgctaccccggctcgccctgctggaagcgc

SEQ ID NO: 3919 - DNA, 42 bp, Madurella mycetomatis
  source 1..42: mol_type = other DNA
cgctgcgtcgccgagggcggatcctgctggattgccaagcgc

SEQ ID NO: 3920 - DNA, 39 bp, Madurella mycetomatis
  source 1..39: mol_type = other DNA
tggtgcctcggcttccccggccagccctgctggaagcgt

SEQ ID NO: 3921 - DNA, 39 bp, Madurella mycetomatis
  source 1..39: mol_type = other DNA
tggtgtctccgcttccccggacaaccctgctggaagcgc

SEQ ID NO: 3922 - DNA, 42 bp, Madurella mycetomatis
  source 1..42: mol_type = other DNA
tggtgctccaaccgtggccaggcctgcgataccgtcaagcgt

SEQ ID NO: 3923 - DNA, 33 bp, Madurella mycetomatis
  source 1..33: mol_type = other DNA
tggtgcaccggcttccccggtcagccctgctgg

SEQ ID NO: 3924 - DNA, 36 bp, Madurella mycetomatis
  source 1..36: mol_type = other DNA
tggtgcaccggtttccccggccagccctgctggaag

SEQ ID NO: 3925 - DNA, 42 bp, Madurella mycetomatis
  source 1..42: mol_type = other DNA
tggtgcacaggctttcccggccagccctgctggaagaagcgc

SEQ ID NO: 3926 - DNA, 33 bp, Madurella mycetomatis; identical to SEQ ID NO: 3923
  source 1..33: mol_type = other DNA

SEQ ID NO: 3927 - DNA, 33 bp, Madurella mycetomatis; identical to SEQ ID NO: 3923
  source 1..33: mol_type = other DNA

SEQ ID NO: 3928 - DNA, 39 bp, Marssonina coronariae
  source 1..39: mol_type = other DNA
acgcttagccttgccacatggctgtccgggttttccaca

SEQ ID NO: 3929 - DNA, 39 bp, Marssonina coronariae
  source 1..39: mol_type = other DNA
gcgcttgactttaccgcaaggctgtccgggttttccaca

SEQ ID NO: 3930 - DNA, 60 bp, Marssonina coronariae
  source 1..60: mol_type = other DNA
acgcttggcctcgtagcatgcacctccaacgaggttacatcgtgcatcgagtgtagccca

SEQ ID NO: 3931 - DNA, 27 bp, Massarina eburnea
  source 1..27: mol_type = other DNA
gcaaggctggccgacgaagcggcattt

SEQ ID NO: 3932 - DNA, 27 bp, Massarina eburnea
  source 1..27: mol_type = other DNA
gcagggctgaccaacaaagcggcattt

SEQ ID NO: 3933 - DNA, 36 bp, Massarina eburnea
  source 1..36: mol_type = other DNA
gtcacgcttgcatggctgaccaacgaagcggcaggt

SEQ ID NO: 3934 - DNA, 39 bp, Melanomma pulvis-pyrius
  source 1..39: mol_type = other DNA
tgccgcttccccggccagccttgctccaaggagaagcgt

SEQ ID NO: 3935 - DNA, 36 bp, Melanomma pulvis-pyrius
  source 1..36: mol_type = other DNA
tgccgcttcccaggccagccctgctccaagaagcgt

SEQ ID NO: 3936 - DNA, 39 bp, Melanomma pulvis-pyrius
  source 1..39: mol_type = other DNA
tgccgcttccccggccagccctgctccaagaacaagcgt

SEQ ID NO: 3937 - DNA, 30 bp, Melanomma pulvis-pyrius
  source 1..30: mol_type = other DNA
tgccgcttccccggccagccctgctccaag

SEQ ID NO: 3938 - DNA, 42 bp, Metarhizium acridum
  source 1..42: mol_type = other DNA
gtctgcaacggtcccaatatcttgtgctggaagaagaagcgt

SEQ ID NO: 3939 - DNA, 33 bp, Metarhizium acridum
  source 1..33: mol_type = other DNA
tggtgctggcagcctggccaaccttgctggaag

SEQ ID NO: 3940 - DNA, 42 bp, Metarhizium acridum
  source 1..42: mol_type = other DNA
tggtgctggcagcctggccaaccttgctggaaggtcaaaaga

SEQ ID NO: 3941 - DNA, 42 bp, Metarhizium acridum
  source 1..42: mol_type = other DNA
tggtgctggaggccaggtcagccatgctggaaagccaagcgt

SEQ ID NO: 3942 - DNA, 42 bp, Metarhizium acridum
  source 1..42: mol_type = other DNA
tggtgctaccggcctgggcaaccctgctggaaggccaagaga

SEQ ID NO: 3943 - DNA, 42 bp, Metarhizium album
  source 1..42: mol_type = other DNA
tggtgcaaccggcccggagagccctgctggaaagccaagaga

SEQ ID NO: 3944 - DNA, 42 bp, Metarhizium album
  source 1..42: mol_type = other DNA
tggtgctggcggccaggcgagccatgctggaaggccaagcgt

SEQ ID NO: 3945 - DNA, 42 bp, Metarhizium album
  source 1..42: mol_type = other DNA
tggtgctggcggcccggagagccctgctggaaggtcaagaga

SEQ ID NO: 3946 - DNA, 42 bp, Metarhizium album
  source 1..42: mol_type = other DNA
tggtgctggcggccgggcatgccttgctggaagagagacagc

SEQ ID NO: 3947 - DNA, 42 bp, Metarhizium anisopliae
  source 1..42: mol_type = other DNA
acgcttggccttccaacatggttgacctggcctccagcacca

SEQ ID NO: 3948 - DNA, 42 bp, Metarhizium anisopliae; identical to SEQ ID NO: 3947
  source 1..42: mol_type = other DNA

SEQ ID NO: 3949 - DNA, 42 bp, Metarhizium anisopliae; identical to SEQ ID NO: 3947
  source 1..42: mol_type = other DNA

SEQ ID NO: 3950 - DNA, 42 bp, Metarhizium anisopliae; identical to SEQ ID NO: 3947
  source 1..42: mol_type = other DNA

SEQ ID NO: 3951 - DNA, 42 bp, Metarhizium anisopliae
  source 1..42: mol_type = other DNA
cctcttggccttccagcagggctgtccgggtgcgctgcacca

SEQ ID NO: 3952 - DNA, 42 bp, Metarhizium anisopliae
  source 1..42: mol_type = other DNA
acgcttggccttccaacatggttgacccggcgcccagcacca

SEQ ID NO: 3953 - DNA, 42 bp, Metarhizium anisopliae
  source 1..42: mol_type = other DNA
acgcttgtctttccagcaaggctggccaggctgccagcacca

SEQ ID NO: 3954 - DNA, 42 bp, Metarhizium anisopliae
  source 1..42: mol_type = other DNA
tctcttgaccttccagcaaggttggccaggtcgccagcacca

SEQ ID NO: 3955 - DNA, 42 bp, Metarhizium anisopliae; identical to SEQ ID NO: 3951
  source 1..42: mol_type = other DNA

SEQ ID NO: 3956 - DNA, 42 bp, Metarhizium anisopliae; identical to SEQ ID NO: 3952
  source 1..42: mol_type = other DNA

SEQ ID NO: 3957 - DNA, 42 bp, Metarhizium anisopliae; identical to SEQ ID NO: 3953
  source 1..42: mol_type = other DNA

SEQ ID NO: 3958 - DNA, 42 bp, Metarhizium anisopliae; identical to SEQ ID NO: 3954
  source 1..42: mol_type = other DNA

SEQ ID NO: 3959 - DNA, 42 bp, Metarhizium anisopliae
  source 1..42: mol_type = other DNA
tggtgcggcgcacccggagagccctgctggaaggccaagagg

SEQ ID NO: 3960 - DNA, 42 bp, Metarhizium anisopliae
  source 1..42: mol_type = other DNA
tggtgcggcggtccgggagagccctgctggaaagacaagcgt

SEQ ID NO: 3961 - DNA, 42 bp, Metarhizium anisopliae
  source 1..42: mol_type = other DNA
tggtgcggcagtccgggagaaccctgctggaaagacaagaga

SEQ ID NO: 3962 - DNA, 42 bp, Metarhizium anisopliae
  source 1..42: mol_type = other DNA
tggtgctgggcgccgggtcaaccatgttggaaggccaagcgt

SEQ ID NO: 3963 - DNA, 42 bp, Metarhizium anisopliae
  source 1..42: mol_type = other DNA
tggtgctggcggcctggccaaccttgctggaaggtcaagaga

SEQ ID NO: 3964 - DNA, 42 bp, Metarhizium anisopliae; identical to SEQ ID NO: 3959
  source 1..42: mol_type = other DNA

SEQ ID NO: 3965 - DNA, 42 bp, Metarhizium anisopliae; identical to SEQ ID NO: 3960
  source 1..42: mol_type = other DNA

SEQ ID NO: 3966 - DNA, 42 bp, Metarhizium anisopliae; identical to SEQ ID NO: 3961
  source 1..42: mol_type = other DNA

SEQ ID NO: 3967 - DNA, 42 bp, Metarhizium anisopliae; identical to SEQ ID NO: 3962
  source 1..42: mol_type = other DNA

SEQ ID NO: 3968 - DNA, 42 bp, Metarhizium anisopliae; identical to SEQ ID NO: 3963
  source 1..42: mol_type = other DNA

SEQ ID NO: 3969 - DNA, 42 bp, Metarhizium brunneum
  source 1..42: mol_type = other DNA
cctcttggccttccagcagggttgtccgggccggccgcacca

SEQ ID NO: 3970 - DNA, 42 bp, Metarhizium brunneum
  source 1..42: mol_type = other DNA
acgcttgtctttccagcagggttctccgggcgcggagcacca

SEQ ID NO: 3971 - DNA, 42 bp, Metarhizium brunneum
  source 1..42: mol_type = other DNA
tctcttgtctttccagcagggttctccgggcgaggagcacca

SEQ ID NO: 3972 - DNA, 42 bp, Metarhizium brunneum; identical to SEQ ID NO: 3947
  source 1..42: mol_type = other DNA

SEQ ID NO: 3973 - DNA, 42 bp, Metarhizium brunneum
  source 1..42: mol_type = other DNA
tctcttgaccttccagcaaggttggccaggccgccagcacca

SEQ ID NO: 3974 - DNA, 42 bp, Metarhizium brunneum
  source 1..42: mol_type = other DNA
tggtgcggccggcccggacaaccctgctggaaggccaagagg

SEQ ID NO: 3975 - DNA, 42 bp, Metarhizium brunneum
  source 1..42: mol_type = other DNA
tggtgctccgcgcccggagaaccctgctggaaagacaagcgt

SEQ ID NO: 3976 - DNA, 42 bp, Metarhizium brunneum
  source 1..42: mol_type = other DNA
tggtgctcctcgcccggagaaccctgctggaaagacaagaga

SEQ ID NO: 3977 - DNA, 42 bp, Metarhizium brunneum
  source 1..42: mol_type = other DNA
tggtgctggaggccaggtcaaccatgttggaaggccaagcgt

SEQ ID NO: 3978 - DNA, 42 bp, Metarhizium brunneum; identical to SEQ ID NO: 3963
  source 1..42: mol_type = other DNA

SEQ ID NO: 3979 - DNA, 42 bp, Metarhizium guizhouense
  source 1..42: mol_type = other DNA
tggtgcggcgcgccaggacaaccctgctggaaggccaagagg

SEQ ID NO: 3980 - DNA, 42 bp, Metarhizium guizhouense
  source 1..42: mol_type = other DNA
tggtgctggcagcctggccagccttgctggaaagacaagcgt

SEQ ID NO: 3981 - DNA, 42 bp, Metarhizium guizhouense
  source 1..42: mol_type = other DNA
tggtgctggaggccgggtcaaccatgttggaaggccaagcgt

SEQ ID NO: 3982 - DNA, 42 bp, Metarhizium guizhouense
  source 1..42: mol_type = other DNA
tggtgctggcgacctggccaaccttgctggaaggtcaagaga

SEQ ID NO: 3983 - DNA, 42 bp, Metarhizium majus; identical to SEQ ID NO: 3953
  source 1..42: mol_type = other DNA

SEQ ID NO: 3984 - DNA, 42 bp, Metarhizium majus
  source 1..42: mol_type = other DNA
acgcttggccttccaacatggttgacccggcctccagcacca

SEQ ID NO: 3985 - DNA, 42 bp, Metarhizium majus; identical to SEQ ID NO: 3954
  source 1..42: mol_type = other DNA

SEQ ID NO: 3986 - DNA, 42 bp, Metarhizium rileyi
  source 1..42: mol_type = other DNA
tctcttggccttccagcaatcatgtccaggccgctggcacca

SEQ ID NO: 3987 - DNA, 33 bp, Metarhizium rileyi
  source 1..33: mol_type = other DNA
cttccagcaaggctgtcctggtcgccagcacca

SEQ ID NO: 3988 - DNA, 33 bp, Metarhizium rileyi
  source 1..33: mol_type = other DNA
cttccagcaaggctgaccagggcgccagcacca

SEQ ID NO: 3989 - DNA, 33 bp, Metarhizium rileyi; identical to SEQ ID NO: 3987
  source 1..33: mol_type = other DNA

SEQ ID NO: 3990 - DNA, 42 bp, Metarhizium rileyi; identical to SEQ ID NO: 3986
  source 1..42: mol_type = other DNA

SEQ ID NO: 3991 - DNA, 33 bp, Metarhizium rileyi; identical to SEQ ID NO: 3987
  source 1..33: mol_type = other DNA

SEQ ID NO: 3992 - DNA, 33 bp, Metarhizium rileyi; identical to SEQ ID NO: 3988
  source 1..33: mol_type = other DNA

SEQ ID NO: 3993 - DNA, 33 bp, Metarhizium rileyi; identical to SEQ ID NO: 3987
  source 1..33: mol_type = other DNA

SEQ ID NO: 3994 - DNA, 42 bp, Metarhizium robertsii
  source 1..42: mol_type = other DNA
cctcttggccttccagcagggctgtccgggtgcgttgcacca

SEQ ID NO: 3995 - DNA, 42 bp, Metarhizium robertsii; identical to SEQ ID NO: 3953
  source 1..42: mol_type = other DNA

SEQ ID NO: 3996 - DNA, 42 bp, Metarhizium robertsii; identical to SEQ ID NO: 3984
  source 1..42: mol_type = other DNA

SEQ ID NO: 3997 - DNA, 42 bp, Metarhizium robertsii; identical to SEQ ID NO: 3954
  source 1..42: mol_type = other DNA

SEQ ID NO: 3998 - DNA, 42 bp, Metarhizium robertsii
  source 1..42: mol_type = other DNA
tggtgcaacgcacccggacagccctgctggaaggccaagagg

SEQ ID NO: 3999 - DNA, 42 bp, Metarhizium robertsii; identical to SEQ ID NO: 3980
  source 1..42: mol_type = other DNA

SEQ ID NO: 4000 - DNA, 42 bp, Metarhizium robertsii; identical to SEQ ID NO: 3981
  source 1..42: mol_type = other DNA

SEQ ID NO: 4001 - DNA, 42 bp, Metarhizium robertsii; identical to SEQ ID NO: 3982
  source 1..42: mol_type = other DNA

SEQ ID NO: 4002 - DNA, 39 bp, Moelleriella libera
  source 1..39: mol_type = other DNA
tcttttcactttggcgaacagtccgtcggggtgccagca

SEQ ID NO: 4003 - DNA, 39 bp, Moelleriella libera
  source 1..39: mol_type = other DNA
ccgcttcaccatgcagaagaagccttggtctgcgcacca

SEQ ID NO: 4004 - DNA, 42 bp, Moelleriella libera
  source 1..42: mol_type = other DNA
acgctttgccttccagcatgtggcatatcgtcgcatgcacca

SEQ ID NO: 4005 - DNA, 39 bp, Mollisia scopiformis
  source 1..39: mol_type = other DNA
acgcttggcctttccacacggctgtcctgggtaaccgca

SEQ ID NO: 4006 - DNA, 39 bp, Mollisia scopiformis
  source 1..39: mol_type = other DNA
tctctttagcttgccacatggctgtcctgggtatccaca

SEQ ID NO: 4007 - DNA, 39 bp, Mollisia scopiformis
  source 1..39: mol_type = other DNA
acgcttgactttaccgcacggttggccggggtaaccaca

SEQ ID NO: 4008 - DNA, 39 bp, Monilinia fructicola
  source 1..39: mol_type = other DNA
tctcttggcctcgaagcaagcaccgccaaccatgttaca

SEQ ID NO: 4009 - DNA, 33 bp, Monilinia fructicola
  source 1..33: mol_type = other DNA
acgcttgcatccttgaccagggcgtccgcacca

SEQ ID NO: 4010 - DNA, 42 bp, Monilinia fructicola
  source 1..42: mol_type = other DNA
tctcttcgccttgcggcatccttgtccggggcgtccgcacca

SEQ ID NO: 4011 - DNA, 33 bp, Monilinia fructicola
  source 1..33: mol_type = other DNA
cttgcggcaaccttgtccagggcgtccacacca

SEQ ID NO: 4012 - DNA, 42 bp, Monilinia fructicola
  source 1..42: mol_type = other DNA
gcgcttggtcttgcggcaaccttgtccagggcgtccacacca

SEQ ID NO: 4013 - DNA, 39 bp, Monilinia fructigena
  source 1..39: mol_type = other DNA
tctcttagcctcgaagcaagcaccaccaaccatgttaca

SEQ ID NO: 4014 - DNA, 33 bp, Monilinia fructigena
  source 1..33: mol_type = other DNA
acgcttgcagccttgaccagggcgtccgcacca

SEQ ID NO: 4015 - DNA, 42 bp, Monilinia fructigena; identical to SEQ ID NO: 4010
  source 1..42: mol_type = other DNA

SEQ ID NO: 4016 - DNA, 42 bp, Monilinia fructigena
  source 1..42: mol_type = other DNA
acgcttggtcttgcggcaaccttgtccagggcgtccgcacca

SEQ ID NO: 4017 - DNA, 39 bp, Monilinia laxa
  source 1..39: mol_type = other DNA
tgtaacatggttggtggggcttgcttcgaggctaagaga

SEQ ID NO: 4018 - DNA, 33 bp, Monilinia laxa
  source 1..33: mol_type = other DNA
tggtgcggacgccccggacaaggatgcaagagg

SEQ ID NO: 4019 - DNA, 42 bp, Monilinia laxa
  source 1..42: mol_type = other DNA
tggtgcggacgccccggacaaggatgccgcaaggcgaagaga

SEQ ID NO: 4020 - DNA, 42 bp, Monilinia laxa
  source 1..42: mol_type = other DNA
tggtgcggacgccctggacaaggttgccgcaagaccaagcgt

SEQ ID NO: 4021 - DNA, 39 bp, Mytilinidion resinicola
  source 1..39: mol_type = other DNA
tgccatctaccaggacaatcttgcagcaaggacaagcgc

SEQ ID NO: 4022 - DNA, 45 bp, Mytilinidion resinicola
  source 1..45: mol_type = other DNA
tggggctgccatctaccaggacaatcttgcagcaaggacaagcgc

SEQ ID NO: 4023 - DNA, 45 bp, Mytilinidion resinicola
  source 1..45: mol_type = other DNA
tggggctgccacctcccgggtcagtcttgcagcaagaacaagcgt

SEQ ID NO: 4024 - DNA, 42 bp, Mytilinidion resinicola
  source 1..42: mol_type = other DNA
tactgccatctccctggccagtcttgtaacaaagacaaacgc

SEQ ID NO: 4025 - DNA, 42 bp, Mytilinidion resinicola
  source 1..42: mol_type = other DNA
tactgccatctccccggccaatcctgcagcaaagacaagcgc

SEQ ID NO: 4026 - DNA, 42 bp, Mytilinidion resinicola
  source 1..42: mol_type = other DNA
tactgccatcgccctggtcaatcttgcagcaaggagaagcgc

SEQ ID NO: 4027 - DNA, 39 bp, Neofusicoccum parvum
  source 1..39: mol_type = other DNA
acgcttgacctgataacatgcctcgccgggctcgttgca

SEQ ID NO: 4028 - DNA, 33 bp, Neofusicoccum parvum
  source 1..33: mol_type = other DNA
cttcgagcacggctggcccttccacctgcacca

SEQ ID NO: 4029 - DNA, 39 bp, Neofusicoccum parvum
  source 1..39: mol_type = other DNA
gcgcttcttcgagcacggctggcccttccacctgcacca

SEQ ID NO: 4030 - DNA, 33 bp, Neofusicoccum parvum; identical to SEQ ID NO: 4028
  source 1..33: mol_type = other DNA

SEQ ID NO: 4031 - DNA, 42 bp, Neonectria ditissima
  source 1..42: mol_type = other DNA
gcgcttggccttccagcacggctgtccgggatggatgcacca

SEQ ID NO: 4032 - DNA, 42 bp, Neonectria ditissima
  source 1..42: mol_type = other DNA
atcgcgcttcttccagcaaggctggccgggatggatgcacca

SEQ ID NO: 4033 - DNA, 39 bp, Neonectria ditissima
  source 1..39: mol_type = other DNA
gcgcttcttccagcagggctggccgggatacttgcacca

SEQ ID NO: 4034 - DNA, 42 bp, Neonectria ditissima
  source 1..42: mol_type = other DNA
gcgcttggccttccagcaaggctgaccggggtgcatgcacca

SEQ ID NO: 4035 - DNA, 42 bp, Neonectria ditissima
  source 1..42: mol_type = other DNA
gcgcttggccttccagcacggctggccgcggtgcatgcacca

SEQ ID NO: 4036 - DNA, 33 bp, Neurospora crassa
  source 1..33: mol_type = other DNA
cttccagcacgactggccgtggatccggcacca

SEQ ID NO: 4037 - DNA, 39 bp, Neurospora crassa
  source 1..39: mol_type = other DNA
acgcttcttccagcacgattggccgtggatgcggcacca

SEQ ID NO: 4038 - DNA, 36 bp, Neurospora crassa
  source 1..36: mol_type = other DNA
acgcttccagcacgactggccgtggatccggcacca

SEQ ID NO: 4039 - DNA, 42 bp, Neurospora crassa
  source 1..42: mol_type = other DNA
acgcttgaccttccagcaggactggccatggatccggcacca

SEQ ID NO: 4040 - DNA, 33 bp, Neurospora crassa; identical to SEQ ID NO: 4036
  source 1..33: mol_type = other DNA

SEQ ID NO: 4041 - DNA, 39 bp, Neurospora crassa; identical to SEQ ID NO: 4037
  source 1..39: mol_type = other DNA

SEQ ID NO: 4042 - DNA, 36 bp, Neurospora crassa; identical to SEQ ID NO: 4038
  source 1..36: mol_type = other DNA

SEQ ID NO: 4043 - DNA, 42 bp, Neurospora crassa; identical to SEQ ID NO: 4039
  source 1..42: mol_type = other DNA

SEQ ID NO: 4044 - DNA, 45 bp, Neurospora tetrasperma
  source 1..45: mol_type = other DNA
tggtgcaacatgaggctccaccccgataggggctgctggaagcgt

SEQ ID NO: 4045 - DNA, 33 bp, Neurospora tetrasperma
  source 1..33: mol_type = other DNA
tggtgccgcatccacggccaatcgtgctggaag

SEQ ID NO: 4046 - DNA, 39 bp, Neurospora tetrasperma
  source 1..39: mol_type = other DNA
tggtgccgcatccacggccaatcgtgctggaagaagcgt

SEQ ID NO: 4047 - DNA, 33 bp, Neurospora tetrasperma
  source 1..33: mol_type = other DNA
tggtgccgcatccacggccagtcctgctggaag

SEQ ID NO: 4048 - DNA, 33 bp, Neurospora tetrasperma; identical to SEQ ID NO: 4045
  source 1..33: mol_type = other DNA

SEQ ID NO: 4049 - DNA, 39 bp, Neurospora tetrasperma
  source 1..39: mol_type = other DNA
tgcaacgctcccgacggcgcctgcaccaaggctacccgt

SEQ ID NO: 4050 - DNA, 33 bp, Neurospora tetrasperma; identical to SEQ ID NO: 4045
  source 1..33: mol_type = other DNA

SEQ ID NO: 4051 - DNA, 39 bp, Neurospora tetrasperma; identical to SEQ ID NO: 4046
  source 1..39: mol_type = other DNA

SEQ ID NO: 4052 - DNA, 33 bp, Neurospora tetrasperma; identical to SEQ ID NO: 4047
  source 1..33: mol_type = other DNA

SEQ ID NO: 4053 - DNA, 42 bp, Neurospora tetrasperma
  source 1..42: mol_type = other DNA
tggtgctggatccatggccagtcctgctggaaggtcaagcgt

SEQ ID NO: 4054 - DNA, 39 bp, Ophiocordyceps camponoti-floridani
  source 1..39: mol_type = other DNA
tctcttggcggcccagcaagcaccgccctcggcaaggca

SEQ ID NO: 4055 - DNA, 39 bp, Ophiocordyceps camponoti-floridani
  source 1..39: mol_type = other DNA
gcgcttctggtgccagcaggcctctccgcgctgcgagca

SEQ ID NO: 4056 - DNA, 42 bp, Ophiocordyceps camponoti-floridani
  source 1..42: mol_type = other DNA
cctcttcttggggccacactgcgagttgggacggtagcacca

SEQ ID NO: 4057 - DNA, 42 bp, Ophiocordyceps camponoti-floridani; identical to SEQ ID NO: 4056
  source 1..42: mol_type = other DNA

SEQ ID NO: 4058 - DNA, 42 bp, Ophiocordyceps camponoti-floridani; identical to SEQ ID NO: 4056
  source 1..42: mol_type = other DNA

SEQ ID NO: 4059 - DNA, 48 bp, Ophiocordyceps camponoti-floridani
  source 1..48: mol_type = other DNA
acgcttggccatcttggggccgcactgcgagttgggacgcgtgcacca

SEQ ID NO: 4060 - DNA, 33 bp, Ophiocordyceps camponoti-floridani
  source 1..33: mol_type = other DNA
agggcgacatgaagtggacggccgtaaacacca

SEQ ID NO: 4061 - DNA, 39 bp, Ophiocordyceps camponoti-rufipedis
  source 1..39: mol_type = other DNA
cctcttggcggcccagcaagcaccgccctcggcatggca

SEQ ID NO: 4062 - DNA, 39 bp, Ophiocordyceps camponoti-rufipedis
  source 1..39: mol_type = other DNA
acgcttctggtgccagcaggcctctccgcgctgcgagca

SEQ ID NO: 4063 - DNA, 42 bp, Ophiocordyceps camponoti-rufipedis
  source 1..42: mol_type = other DNA
cctcttggccttggagcagatggagttggggcgcttgcacca

SEQ ID NO: 4064 - DNA, 42 bp, Ophiocordyceps camponoti-rufipedis
  source 1..42: mol_type = other DNA
cctcttgaccttggagcagatggaattgggacgcttgcacca

SEQ ID NO: 4065 - DNA, 48 bp, Ophiocordyceps camponoti-rufipedis
  source 1..48: mol_type = other DNA
gcgcttctccatggcggtgccgcactgcgaattgggacgcttgcacca

SEQ ID NO: 4066 - DNA, 45 bp, Ophiocordyceps camponoti-rufipedis
  source 1..45: mol_type = other DNA
gcgcttgacgacggtcgggcagttggagaggggacgagtgcacca

SEQ ID NO: 4067 - DNA, 36 bp, Ophiostoma piceae
  source 1..36: mol_type = other DNA
gcgcttgaggcagccctggcccatccacgtgcatag

SEQ ID NO: 4068 - DNA, 42 bp, Ophiostoma piceae
  source 1..42: mol_type = other DNA
gcgcttggccttccagcagggctggccgaccatggggcacca

SEQ ID NO: 4069 - DNA, 42 bp, Ophiostoma piceae
  source 1..42: mol_type = other DNA
acgcttgaccttccagcaaggctggccgaccatggggcacca

SEQ ID NO: 4070 - DNA, 42 bp, Penicilliopsis zonata
  source 1..42: mol_type = other DNA
gcgcttgatcttctcgcaaccctggcctggctgccagcacca

SEQ ID NO: 4071 - DNA, 42 bp, Penicilliopsis zonata
  source 1..42: mol_type = other DNA
acgcttcagcatgtagcaaccctgaccaggctgccagcacca

SEQ ID NO: 4072 - DNA, 42 bp, Penicillium antarcticum
  source 1..42: mol_type = other DNA
tggtgtggacaccccggacagggctgcttcaaggccaagcgt

SEQ ID NO: 4073 - DNA, 42 bp, Penicillium antarcticum
  source 1..42: mol_type = other DNA
tggtgtggtcatcccggccagggctgctacatgatgaagcgc

SEQ ID NO: 4074 - DNA, 42 bp, Penicillium arizonense
  source 1..42: mol_type = other DNA
acgcttagccttgaagcagccttgtccagggtgtccacacca

SEQ ID NO: 4075 - DNA, 42 bp, Penicillium arizonense
  source 1..42: mol_type = other DNA
gcgcttcatcatgtagcagccctgaccggggtgaccacacca

SEQ ID NO: 4076 - DNA, 42 bp, Penicillium brasilianum
  source 1..42: mol_type = other DNA
gcgcttgaccttggcgcagccctggccggggtgagcacacca

SEQ ID NO: 4077 - DNA, 42 bp, Penicillium brasilianum
  source 1..42: mol_type = other DNA
gcgcttcatcatgtagcagccctggccggggtgggcgcacca

SEQ ID NO: 4078 - DNA, 36 bp, Penicillium brasilianum
  source 1..36: mol_type = other DNA
gcgcttggcgcagccctggccggggtgaccacacca

SEQ ID NO: 4079 - DNA, 42 bp, Penicillium brasilianum; identical to SEQ ID NO: 4076
  source 1..42: mol_type = other DNA

SEQ ID NO: 4080 - DNA, 42 bp, Penicillium brasilianum
  source 1..42: mol_type = other DNA
gcgcttcatcatgtagcagccctgaccggggtgggcgcacca

SEQ ID NO: 4081 - DNA, 36 bp, Penicillium brasilianum; identical to SEQ ID NO: 4078
  source 1..36: mol_type = other DNA

SEQ ID NO: 4082 - DNA, 33 bp, Penicillium chrysogenum
  source 1..33: mol_type = other DNA
tcgcttgcagccctggccaatgtggccacacca

SEQ ID NO: 4083 - DNA, 42 bp, Penicillium chrysogenum
  source 1..42: mol_type = other DNA
acgcttggccttgtagcaaccctgaccgatgtggccacacca

SEQ ID NO: 4084 - DNA, 42 bp, Penicillium decumbens
  source 1..42: mol_type = other DNA
tggtgcggtcacgctggccagggctgttccaaggccaagcgc

SEQ ID NO: 4085 - DNA, 42 bp, Penicillium decumbens
  source 1..42: mol_type = other DNA
tggtgcggtcaccccggccagggctgctacatgtacaagcgt

SEQ ID NO: 4086 - DNA, 33 bp, Penicillium digitatum
  source 1..33: mol_type = other DNA
tcgcttgcagccctggccgatgtggccacacca

SEQ ID NO: 4087 - DNA, 42 bp, Penicillium digitatum
  source 1..42: mol_type = other DNA
gcgcttagccttgtagcagccctggccaatgtggccacacca

SEQ ID NO: 4088 - DNA, 33 bp, Penicillium digitatum; identical to SEQ ID NO: 4086
  source 1..33: mol_type = other DNA

SEQ ID NO: 4089 - DNA, 42 bp, Penicillium digitatum; identical to SEQ ID NO: 4087
  source 1..42: mol_type = other DNA

SEQ ID NO: 4090 - DNA, 42 bp, Penicillium rolfsii
  source 1..42: mol_type = other DNA
gcgcttaaccttggcgcagccctggccggggtgagcacacca

SEQ ID NO: 4091 - DNA, 42 bp, Penicillium rolfsii
  source 1..42: mol_type = other DNA
gcgcttcatcatgtagcagccctggcctgggtgaccgcacca

SEQ ID NO: 4092 - DNA, 33 bp, Penicillium roqueforti
  source 1..33: mol_type = other DNA
ccgcttgcagccctggccgatgtggccacacca

SEQ ID NO: 4093 - DNA, 42 bp, Penicillium roqueforti
  source 1..42: mol_type = other DNA
acgcttggccttgtagcagccctggccaatgtggccacacca

SEQ ID NO: 4094 - DNA, 42 bp, Penicillium steckii
  source 1..42: mol_type = other DNA
acgcttaaccttataacaaccctgacctgggtgaccacacca

SEQ ID NO: 4095 - DNA, 42 bp, Penicillium steckii
  source 1..42: mol_type = other DNA
acgcttcatcatgtagcaaccctgaccgggatgaccacacca

SEQ ID NO: 4096 - DNA, 42 bp, Penicillium subrubescens
  source 1..42: mol_type = other DNA
gcgcttgacctttgcgcagccctggccggggtgagcgcacca

SEQ ID NO: 4097 - DNA, 42 bp, Penicillium subrubescens
  source 1..42: mol_type = other DNA
gcgcttcatcatgtagcagccctggccagggtgggcacacca

SEQ ID NO: 4098 - DNA, 36 bp, Penicillium subrubescens
  source 1..36: mol_type = other DNA
gcgcttggcgcagccctggccggggtgaccgcacca

SEQ ID NO: 4099 - DNA, 42 bp, Phaeoacremonium minimum
  source 1..42: mol_type = other DNA
tggtgcaccaaacacggccagagctgctggaaggctaagcgc

SEQ ID NO: 4100 - DNA, 33 bp, Phaeoacremonium minimum
  source 1..33: mol_type = other DNA
tggtgcaccaagcacgggcagtcctgctggaag

SEQ ID NO: 4101 - DNA, 33 bp, Phaeoacremonium minimum
  source 1..33: mol_type = other DNA
tggtgcaccaaacacggccagagctgctggaag

SEQ ID NO: 4102 - DNA, 42 bp, Phaeoacremonium minimum
  source 1..42: mol_type = other DNA
tggtgcaccaagcacgggcagtcctgctggaaggtgaagcgc

SEQ ID NO: 4103 - DNA, 33 bp, Phialemoniopsis curvata
  source 1..33: mol_type = other DNA
tggtgccccatccgcggccagccttgctggaag

SEQ ID NO: 4104 - DNA, 36 bp, Phialemoniopsis curvata
  source 1..36: mol_type = other DNA
tggtgccccatccgcggccagccttgctggaagcgc

SEQ ID NO: 4105 - DNA, 33 bp, Phialemoniopsis curvata; identical to SEQ ID NO: 4103
  source 1..33: mol_type = other DNA

SEQ ID NO: 4106 - DNA, 39 bp, Phialocephala subalpina
  source 1..39: mol_type = other DNA
acgcttggcttttccgcaaggttggccgggataaccgca

SEQ ID NO: 4107 - DNA, 39 bp, Phialocephala subalpina
  source 1..39: mol_type = other DNA
acgcttgaccttgccacatggctgacctgggtatccgca

SEQ ID NO: 4108 - DNA, 39 bp, Phialocephala subalpina
  source 1..39: mol_type = other DNA
acgcttggccttgttgcacggctgtccggggtatccgca

SEQ ID NO: 4109 - DNA, 39 bp, Phialocephala subalpina
  source 1..39: mol_type = other DNA
acgcttagccttggagcacggctgtcctgggtaaccgca

SEQ ID NO: 4110 - DNA, 39 bp, Phialocephala subalpina
  source 1..39: mol_type = other DNA
gcgcttgaccttggagcaaggctgtccgggatatccgca

SEQ ID NO: 4111 - DNA, 39 bp, Phialocephala subalpina
  source 1..39: mol_type = other DNA
tctcttcagcttggagcaaggttgtcctcggtatccaca

SEQ ID NO: 4112 - DNA, 36 bp, Pleomassaria siparia
  source 1..36: mol_type = other DNA
acgcttagccatacatggctggccagggaagtggca

SEQ ID NO: 4113 - DNA, 36 bp, Pleomassaria siparia
  source 1..36: mol_type = other DNA
acgcttggtcatacatggctggccagggaagtggca

SEQ ID NO: 4114 - DNA, 36 bp, Pleomassaria siparia
  source 1..36: mol_type = other DNA
gcgcttgctggagcagggctggccagggaagtggca

SEQ ID NO: 4115 - DNA, 39 bp, Pleomassaria siparia
  source 1..39: mol_type = other DNA
gcgcttctccttggtgcagggctggccggggaagtggca

SEQ ID NO: 4116 - DNA, 39 bp, Pochonia chlamydosporia
  source 1..39: mol_type = other DNA
atctgcaacggcccaggaatcttgtgctggaagaaacgc

SEQ ID NO: 4117 - DNA, 42 bp, Pochonia chlamydosporia
  source 1..42: mol_type = other DNA
aggtgctggaggcctggcgagccgtgcttcaaggtaaagaga

SEQ ID NO: 4118 - DNA, 42 bp, Pochonia chlamydosporia
  source 1..42: mol_type = other DNA
tggtgcaatcgtcccgggcagtcctgctggaaggccaagaga

SEQ ID NO: 4119 - DNA, 33 bp, Pochonia chlamydosporia
  source 1..33: mol_type = other DNA
tggtgctggaggccaggccagccttgctggaag

SEQ ID NO: 4120 - DNA, 36 bp, Pochonia chlamydosporia
  source 1..36: mol_type = other DNA
tggtgctggaggccaggccagccttgctggaagcgt

SEQ ID NO: 4121 - DNA, 42 bp, Pochonia chlamydosporia
  source 1..42: mol_type = other DNA
tggtgctggaggccaggccagtcatgctggaaggcgaagcgt

SEQ ID NO: 4122 - DNA, 39 bp, Pochonia chlamydosporia; identical to SEQ ID NO: 4116
  source 1..39: mol_type = other DNA

SEQ ID NO: 4123 - DNA, 42 bp, Pochonia chlamydosporia
  source 1..42: mol_type = other DNA
tggtgccatcgtcccgggcagtcctgctggaaggccaagaga

SEQ ID NO: 4124 - DNA, 42 bp, Pochonia chlamydosporia
  source 1..42: mol_type = other DNA
tggtgctggaggcctggcgagccgtgcttcaaggtaaagaga

SEQ ID NO: 4125 - DNA, 33 bp, Pochonia chlamydosporia; identical to SEQ ID NO: 4119
  source 1..33: mol_type = other DNA

SEQ ID NO: 4126 - DNA, 36 bp, Pochonia chlamydosporia; identical to SEQ ID NO: 4120
  source 1..36: mol_type = other DNA

SEQ ID NO: 4127 - DNA, 42 bp, Pochonia chlamydosporia; identical to SEQ ID NO: 4121
  source 1..42: mol_type = other DNA

SEQ ID NO: 4128 - DNA, 33 bp, Pochonia chlamydosporia
  source 1..33: mol_type = other DNA
tggtgctggaggccaggccagtcatgctggaag

SEQ ID NO: 4129 - DNA, 39 bp, Podospora comata
  source 1..39: mol_type = other DNA
tgcaccgccgaggacggcgcctgcaccaaggccaagcgc

SEQ ID NO: 4130 - DNA, 39 bp, Podospora comata
  source 1..39: mol_type = other DNA
tggtgcctccgtttcgtcggccagtcctgctggaagcgc

SEQ ID NO: 4131 - DNA, 42 bp, Podospora comata
  source 1..42: mol_type = other DNA
tggtgcaacaccgagggccaggcctgcaacaccgttgcccgc

SEQ ID NO: 4132 - DNA, 42 bp, Polychaeton citri
  source 1..42: mol_type = other DNA
ttctgcggtgccccaggtgcctcgtgcgctaaagtgaagcgc

SEQ ID NO: 4133 - DNA, 39 bp, Polyplosphaeria fusca
  source 1..39: mol_type = other DNA
tgcggcatgcctggagctccttgcaaccgtctcaagcgc

SEQ ID NO: 4134 - DNA, 39 bp, Polyplosphaeria fusca
  source 1..39: mol_type = other DNA
tgcctcttcagtggccagtcttgctccgctgcaaaacgt

SEQ ID NO: 4135 - DNA, 36 bp, Polyplosphaeria fusca
  source 1..36: mol_type = other DNA
tgccgcttcccaggatcgttctgtggcaagaagagg

SEQ ID NO: 4136 - DNA, 39 bp, Polyplosphaeria fusca
  source 1..39: mol_type = other DNA
tgccgcttcccgggctcgttctgcggcaagagcaagcgt

SEQ ID NO: 4137 - DNA, 36 bp, Polyplosphaeria fusca
  source 1..36: mol_type = other DNA
tgccgctatccaggctccttctgtggcaggaagagg

SEQ ID NO: 4138 - DNA, 39 bp, Polyplosphaeria fusca
  source 1..39: mol_type = other DNA
tgctcctttggtgacgatacttgcgcgaagatcaagcgc

SEQ ID NO: 4139 - DNA, 42 bp, Pseudogymnoascus destructans
  source 1..42: mol_type = other DNA
acgcttgactttgccgcatagctgaccaggacgctggcagaa

SEQ ID NO: 4140 - DNA, 42 bp, Pseudogymnoascus destructans
  source 1..42: mol_type = other DNA
tcgcttgactttgtcgcagggctggccgaggcgccagcagaa

SEQ ID NO: 4141 - DNA, 42 bp, Pseudogymnoascus destructans
  source 1..42: mol_type = other DNA
gcgcttggccttttcgcatatctggcctggacgccagcagaa

SEQ ID NO: 4142 - DNA, 42 bp, Pseudogymnoascus destructans
  source 1..42: mol_type = other DNA
acgcttggccttgccgcatggctgcccggggcgccagcagaa

SEQ ID NO: 4143 - DNA, 42 bp, Pseudogymnoascus destructans
  source 1..42: mol_type = other DNA
gcgcttgaccttgccacatggctgccctggacgccagcagaa

SEQ ID NO: 4144 - DNA, 42 bp, Pseudogymnoascus destructans
  source 1..42: mol_type = other DNA
ttctgccagcgtcctggtcagctatgcggcaaagtcaagcgt

SEQ ID NO: 4145 - DNA, 42 bp, Pseudogymnoascus destructans
  source 1..42: mol_type = other DNA
ttctgctggcgcctcggccagccctgcgacaaagtcaagcga

SEQ ID NO: 4146 - DNA, 42 bp, Pseudogymnoascus destructans
  source 1..42: mol_type = other DNA
ttctgctggcgtccaggccagatatgcgaaaaggccaagcgc

SEQ ID NO: 4147 - DNA, 42 bp, Pseudogymnoascus destructans
  source 1..42: mol_type = other DNA
ttctgctggcgccccgggcagccatgcggcaaggccaagcgt

SEQ ID NO: 4148 - DNA, 42 bp, Pseudogymnoascus destructans
  source 1..42: mol_type = other DNA
ttctgctggcgtccagggcagccatgtggcaaggtcaagcgc

SEQ ID NO: 4149 - DNA, 39 bp, Pseudogymnoascus sp.
  source 1..39: mol_type = other DNA; note = 03VT05
tgctggcgcccaggtcagccatgcggtaaggccaagcgt

SEQ ID NO: 4150 - DNA, 39 bp, Pseudogymnoascus sp.
  source 1..39: mol_type = other DNA; note = 03VT05
tgctggcgccccggccagccctgcggcaaagtcaagcgc

SEQ ID NO: 4151 - DNA, 42 bp, Pseudogymnoascus sp.
  source 1..42: mol_type = other DNA; note = 03VT05
atctgctggcgcccaggtcagccatgcggtaaggccaagcgt

SEQ ID NO: 4152 - DNA, 39 bp, Pseudogymnoascus sp.; identical to SEQ ID NO: 4149
  source 1..39: mol_type = other DNA; note = 05NY08

SEQ ID NO: 4153 - DNA, 39 bp, Pseudogymnoascus sp.; identical to SEQ ID NO: 4150
  source 1..39: mol_type = other DNA; note = 05NY08

SEQ ID NO: 4154 - DNA, 42 bp, Pseudogymnoascus sp.; identical to SEQ ID NO: 4151
  source 1..42: mol_type = other DNA; note = 05NY08

SEQ ID NO: 4155 - DNA, 39 bp, Pseudogymnoascus sp.
  source 1..39: mol_type = other DNA; note = 24MN13
acgcttgaccttgccgcatggctgacctggacgccagca

SEQ ID NO: 4156 - DNA, 42 bp, Pseudogymnoascus sp.
  source 1..42: mol_type = other DNA; note = 24MN13
acgcttagccttgccgcatggctgacctgggcgccagcagat

SEQ ID NO: 4157 - DNA, 24 bp, Pseudogymnoascus sp.
  source 1..24: mol_type = other DNA; note = 24MN13
acgcttagccttgccgcatggctg

SEQ ID NO: 4158 - DNA, 42 bp, Pseudogymnoascus sp.
  source 1..42: mol_type = other DNA; note = 23342-1-I1
acgcttggccttgccacatggctggccaggacgccagcaaaa

SEQ ID NO: 4159 - DNA, 42 bp, Pseudogymnoascus sp.
  source 1..42: mol_type = other DNA; note = 23342-1-I1
gcgcttgaccttgccacatggctggccagggcgccagcagaa

SEQ ID NO: 4160 - DNA, 39 bp, Pseudogymnoascus sp.
  source 1..39: mol_type = other DNA; note = VKM F-103
tgctggcgccccggtcagccatgcggcaaggctaagcgt

SEQ ID NO: 4161 - DNA, 39 bp, Pseudogymnoascus sp.; identical to SEQ ID NO: 4150
  source 1..39: mol_type = other DNA; note = VKM F-103

SEQ ID NO: 4162 - DNA, 42 bp, Pseudogymnoascus sp.
  source 1..42: mol_type = other DNA; note = VKM F-103
atctgctggcgccccggtcagccatgcggcaaggctaagcgt

SEQ ID NO: 4163 - DNA, 39 bp, Pseudogymnoascus sp.
  source 1..39: mol_type = other DNA; note = VKM F-3557
tgctggcgccccggtcagccttgtggcaaggccaagcgt

SEQ ID NO: 4164 - DNA, 39 bp, Pseudogymnoascus sp.
  source 1..39: mol_type = other DNA; note = VKM F-3557
tgctggcgccccggccagccctgcggaaaggtcaagcgc

SEQ ID NO: 4165 - DNA, 42 bp, Pseudogymnoascus sp.
  source 1..42: mol_type = other DNA; note = VKM F-3557
atctgctggcgtccaggccagccatgcggaaaagccaagcgc

SEQ ID NO: 4166 - DNA, 39 bp, Pseudogymnoascus sp.
  source 1..39: mol_type = other DNA; note = VKM F-3775
acgcttagccttaccgcatggctgaccggggcgccagca

SEQ ID NO: 4167 - DNA, 39 bp, Pseudogymnoascus sp.
  source 1..39: mol_type = other DNA; note = VKM F-3775
gcgcttaaccttgccacatggctgacccgggcgccaaca

SEQ ID NO: 4168 - DNA, 39 bp, Pseudogymnoascus sp.
  source 1..39: mol_type = other DNA; note = VKM F-4246
acgcttggccttgccgcatggctggcccggaagccagca

SEQ ID NO: 4169 - DNA, 39 bp, Pseudogymnoascus sp.
  source 1..39: mol_type = other DNA; note = VKM F-4246
acgcttgaccttgccgcatggctggcctggaagccagca

SEQ ID NO: 4170 - DNA, 39 bp, Pseudogymnoascus sp.
  source 1..39: mol_type = other DNA; note = VKM F-4281
acgcttggcctttccacatggctgtccagggcgatggca

SEQ ID NO: 4171 - DNA, 39 bp, Pseudogymnoascus sp.
  source 1..39: mol_type = other DNA; note = VKM F-4281
gcgcttgactttgccgcagggctgtccggggcgatggca

SEQ ID NO: 4172 - DNA, 42 bp, Pseudogymnoascus sp.
  source 1..42: mol_type = other DNA; note = VKM F-4281
gcgcttcagcttgccacatggctgtccagggcgatggcagaa

SEQ ID NO: 4173 - DNA, 42 bp, Pseudogymnoascus sp.
  source 1..42: mol_type = other DNA; note = VKM F-4281
gcgcttggccttgccacatggccgtccagggcgatggcagaa

SEQ ID NO: 4174 - DNA, 39 bp, Pseudogymnoascus sp.; identical to SEQ ID NO: 4168
  source 1..39: mol_type = other DNA; note = VKM F-4513

SEQ ID NO: 4175 - DNA, 39 bp, Pseudogymnoascus sp.; identical to SEQ ID NO: 4169
  source 1..39: mol_type = other DNA; note = VKM F-4513

SEQ ID NO: 4176 - DNA, 39 bp, Pseudogymnoascus sp.
  source 1..39: mol_type = other DNA; note = VKM F-4514
acgcttggccttgccacaaggctgaccggggcgccagca

SEQ ID NO: 4177 - DNA, 39 bp, Pseudogymnoascus sp.
  source 1..39: mol_type = other DNA; note = VKM F-4514
gcgcttgaccttgccacagggctggccggggcgccagca

SEQ ID NO: 4178 - DNA, 42 bp, Pseudogymnoascus sp.
  source 1..42: mol_type = other DNA; note = VKM F-4514
acgcttggccttgccacaaggctgaccggggcgccagcaaat

SEQ ID NO: 4179 - DNA, 42 bp, Pseudogymnoascus sp.
  source 1..42: mol_type = other DNA; note = VKM F-4515
tactgctggcgccccggtcagccatgcggaaaggccaagcgt

SEQ ID NO: 4180 - DNA, 42 bp, Pseudogymnoascus sp.
  source 1..42: mol_type = other DNA; note = VKM F-4515
tactgctggcgccctggccagccctgcgggaaagtcaagcgt

SEQ ID NO: 4181 - DNA, 39 bp, Pseudogymnoascus sp.; identical to SEQ ID NO: 4163
  source 1..39: mol_type = other DNA; note = VKM F-4516

SEQ ID NO: 4182 - DNA, 39 bp, Pseudogymnoascus sp.; identical to SEQ ID NO: 4164
  source 1..39: mol_type = other DNA; note = VKM F-4516

SEQ ID NO: 4183 - DNA, 42 bp, Pseudogymnoascus sp.; identical to SEQ ID NO: 4165
  source 1..42: mol_type = other DNA; note = VKM F-4516

SEQ ID NO: 4184 - DNA, 42 bp, Pseudogymnoascus sp.
  source 1..42: mol_type = other DNA; note = VKM F-4517
acgcttggccttgccgcatggctggccaggacgccagcagta

SEQ ID NO: 4185 - DNA, 42 bp, Pseudogymnoascus sp.
  source 1..42: mol_type = other DNA; note = VKM F-4517
acgcttgactttcccgcagggctggccagggcgccagcagta

SEQ ID NO: 4186 - DNA, 42 bp, Pseudogymnoascus sp.
  source 1..42: mol_type = other DNA; note = VKM F-4518
ttctgctggcgtccaggacagccctgcggaaaagccaagcgc

SEQ ID NO: 4187 - DNA, 42 bp, Pseudogymnoascus sp.
  source 1..42: mol_type = other DNA; note = VKM F-4518
ttctgctggcgccccggacagccctgcggcaaggtcaagcgt

SEQ ID NO: 4188 - DNA, 39 bp, Pseudogymnoascus sp.; identical to SEQ ID NO: 4160
  source 1..39: mol_type = other DNA; note = VKM F-4519

SEQ ID NO: 4189 - DNA, 39 bp, Pseudogymnoascus sp.
  source 1..39: mol_type = other DNA; note = VKM F-4519
tgctggcgccccggccagccctgcggcaaagtcaagcgt

SEQ ID NO: 4190 - DNA, 42 bp, Pseudogymnoascus sp.; identical to SEQ ID NO: 4162
  source 1..42: mol_type = other DNA; note = VKM F-4519

SEQ ID NO: 4191 - DNA, 42 bp, Pseudogymnoascus sp.
  source 1..42: mol_type = other DNA; note = VKM F-4520
acgcttagctttgccgcatggctggccaggacgccagcagaa

SEQ ID NO: 4192 - DNA, 42 bp, Pseudogymnoascus sp.
  source 1..42: mol_type = other DNA; note = VKM F-4520
acgcttgactttgccgcagggctgtccgggacgccagcagaa

SEQ ID NO: 4193 - DNA, 39 bp, Pseudogymnoascus sp.
  source 1..39: mol_type = other DNA; note = WSF 3629
tgctggcgccccggccagccctgtggcatagtcaagcgt

SEQ ID NO: 4194 - DNA, 39 bp, Pseudogymnoascus sp.
  source 1..39: mol_type = other DNA; note = WSF 3629
tgctggcgtcccggtcagccatgcggtaaggccaagcgt

SEQ ID NO: 4195 - DNA, 39 bp, Pseudogymnoascus sp.
  source 1..39: mol_type = other DNA; note = WSF 3629
tgctggcgccctggccagccatgtggcaaggtcaagcgc

SEQ ID NO: 4196 - DNA, 42 bp, Pseudogymnoascus sp.
  source 1..42: mol_type = other DNA; note = WSF 3629
atctgctggcgtcccggtcagccatgcggtaaggccaagcgt

SEQ ID NO: 4197 - DNA, 39 bp, Pseudogymnoascus verrucosus
  source 1..39: mol_type = other DNA
acgcttagccttgccgcatggctgaccggggcgccagca

SEQ ID NO: 4198 - DNA, 39 bp, Pseudogymnoascus verrucosus; identical to SEQ ID NO: 4155
  source 1..39: mol_type = other DNA

SEQ ID NO: 4199 - DNA, 42 bp, Pseudogymnoascus verrucosus
  source 1..42: mol_type = other DNA
acgcttagccttgccgcatggctgaccggggcgccagcagat

SEQ ID NO: 4200 - DNA, 33 bp, Purpureocillium lilacinum
  source 1..33: mol_type = other DNA
tggtgcaaccgacccggccagccatgcaagcga

SEQ ID NO: 4201 - DNA, 33 bp, Purpureocillium lilacinum
  source 1..33: mol_type = other DNA
tggtgcactcgccccggtcagccctgcaagcga

SEQ ID NO: 4202 - DNA, 33 bp, Purpureocillium lilacinum
  source 1..33: mol_type = other DNA
tggtgcactcgccgaggccaaccttgcaagcgt

SEQ ID NO: 4203 - DNA, 42 bp, Purpureocillium lilacinum
  source 1..42: mol_type = other DNA
tggtgctaccgacccggccagccttgccgcaaggccaagcgc

SEQ ID NO: 4204 - DNA, 33 bp, Purpureocillium lilacinum; identical to SEQ ID NO: 4200
  source 1..33: mol_type = other DNA

SEQ ID NO: 4205 - DNA, 33 bp, Purpureocillium lilacinum
  source 1..33: mol_type = other DNA
tggtgcactcgccccggccagccctgcaagcga

SEQ ID NO: 4206 - DNA, 33 bp, Purpureocillium lilacinum; identical to SEQ ID NO: 4202
  source 1..33: mol_type = other DNA

SEQ ID NO: 4207 - DNA, 42 bp, Purpureocillium lilacinum; identical to SEQ ID NO: 4203
  source 1..42: mol_type = other DNA

SEQ ID NO: 4208 - DNA, 33 bp, Purpureocillium lilacinum; identical to SEQ ID NO: 4200
  source 1..33: mol_type = other DNA

SEQ ID NO: 4209 - DNA, 33 bp, Purpureocillium lilacinum; identical to SEQ ID NO: 4205
  source 1..33: mol_type = other DNA

SEQ ID NO: 4210 - DNA, 33 bp, Purpureocillium lilacinum; identical to SEQ ID NO: 4202
  source 1..33: mol_type = other DNA

SEQ ID NO: 4211 - DNA, 42 bp, Purpureocillium lilacinum; identical to SEQ ID NO: 4203
  source 1..42: mol_type = other DNA

SEQ ID NO: 4212 - DNA, 42 bp, Pyricularia grisea
  source 1..42: mol_type = other DNA
ccgcttggccacgtcgcacgcctcgcccgcctcgttgcagtg

SEQ ID NO: 4213 - DNA, 36 bp, Pyricularia grisea
  source 1..36: mol_type = other DNA
ccgcttccagcacggctggcctcggcgcgggcacca

SEQ ID NO: 4214 - DNA, 42 bp, Pyricularia grisea
  source 1..42: mol_type = other DNA
ccgcttgaccttccagcagggctggccgcggcggggacacca

SEQ ID NO: 4215 - DNA, 42 bp, Pyricularia oryzae
  source 1..42: mol_type = other DNA
cactgcaactctgccggcgaggcctgcgacgtggccaagcgc

SEQ ID NO: 4216 - DNA, 36 bp, Pyricularia oryzae
  source 1..36: mol_type = other DNA
tggtgcccccgccgcggccagccctgctggaagcgc

SEQ ID NO: 4217 - DNA, 33 bp, Pyricularia oryzae
  source 1..33: mol_type = other DNA
tggtgcccccgccgcggccagccctgctggaag

SEQ ID NO: 4218 - DNA, 42 bp, Pyricularia oryzae; identical to SEQ ID NO: 4215
  source 1..42: mol_type = other DNA

SEQ ID NO: 4219 - DNA, 36 bp, Pyricularia oryzae; identical to SEQ ID NO: 4216
  source 1..36: mol_type = other DNA

SEQ ID NO: 4220 - DNA, 33 bp, Pyricularia oryzae; identical to SEQ ID NO: 4217
  source 1..33: mol_type = other DNA

SEQ ID NO: 4221 - DNA, 42 bp, Pyricularia oryzae
  source 1..42: mol_type = other DNA
gcgcttggccacgtcgcaggcctcgccggcagagttgcagtg

SEQ ID NO: 4222 - DNA, 36 bp, Pyricularia oryzae
  source 1..36: mol_type = other DNA
ccgcttccagcagggctggccgcgacgcgggcacca

SEQ ID NO: 4223 - DNA, 33 bp, Pyricularia oryzae
  source 1..33: mol_type = other DNA
cttccagcaaggctggcctcggcgcgggcacca

SEQ ID NO: 4224 - DNA, 42 bp, Pyricularia oryzae; identical to SEQ ID NO: 4215
  source 1..42: mol_type = other DNA

SEQ ID NO: 4225 - DNA, 36 bp, Pyricularia oryzae; identical to SEQ ID NO: 4216
  source 1..36: mol_type = other DNA

SEQ ID NO: 4226 - DNA, 33 bp, Pyricularia oryzae; identical to SEQ ID NO: 4217
  source 1..33: mol_type = other DNA

SEQ ID NO: 4227 - DNA, 33 bp, Pyricularia pennisetigena; identical to SEQ ID NO: 4217
  source 1..33: mol_type = other DNA

SEQ ID NO: 4228 - DNA, 42 bp, Pyricularia pennisetigena
  source 1..42: mol_type = other DNA
tggtgcccccgccgcggccagccctgctggaaggtcaagcgc

SEQ ID NO: 4229 - DNA, 42 bp, Pyricularia sp.
  source 1..42: mol_type = other DNA; note = CBS 133598
ccgcttggccacgtcgcacgcctcgccggcagagttgcagtg

SEQ ID NO: 4230 - DNA, 36 bp, Pyricularia sp.
  source 1..36: mol_type = other DNA; note = CBS 133598
ccgcttccagcacggctgcccacggcgcgggcacca

SEQ ID NO: 4231 - DNA, 42 bp, Pyricularia sp.
  source 1..42: mol_type = other DNA; note = CBS 133598
ccgcttgaccttccagcagggctggccgcggcgggggcacca

SEQ ID NO: 4232 - DNA, 39 bp, Ramularia collo-cygni
  source 1..39: mol_type = other DNA
tgtggtgcccctggtgtcgcctgccacaaggcccgccgc

SEQ ID NO: 4233 - DNA, 39 bp, Ramularia collo-cygni
  source 1..39: mol_type = other DNA
tgcggaattcccggatctccctgcgctcgtctgaagcgt

SEQ ID NO: 4234 - DNA, 39 bp, Ramularia collo-cygni
  source 1..39: mol_type = other DNA
tgcaacgcacccggtggtgcttgcgacattgccaagcgc

SEQ ID NO: 4235 - DNA, 42 bp, Ramularia collo-cygni
  source 1..42: mol_type = other DNA
ttctgcggtccccgtggtgtctcctgcgccaaggcgaagcgt

SEQ ID NO: 4236 - DNA, 42 bp, Ramularia collo-cygni
  source 1..42: mol_type = other DNA
ttctgcggtccccgtggcgtctcctgcgccaagaccaagcgt

SEQ ID NO: 4237 - DNA, 42 bp, Ramularia collo-cygni
  source 1..42: mol_type = other DNA
ttctgcggtccccgtggcgtatcttgcgccaaggtcaagcgc

SEQ ID NO: 4238 - DNA, 39 bp, Rhizodiscina lignyota
  source 1..39: mol_type = other DNA
tgcaacaaggacggccagccgtgcgccaaggcaaagcgt

SEQ ID NO: 4239 - DNA, 39 bp, Rhizodiscina lignyota
  source 1..39: mol_type = other DNA
tgctacaaggagggcgggaaatgccagaaagctaaacgt

SEQ ID NO: 4240 - DNA, 42 bp, Rhizodiscina lignyota
  source 1..42: mol_type = other DNA
ctctgccaccttgttggccaaccatgcctcaagaaaaagcga

SEQ ID NO: 4241 - DNA, 63 bp, Rutstroemia sp.
  source 1..63: mol_type = other DNA; note = NJR-2017a BBW
ttcgatgaggcggttgtgaagaggtgtaatatggtgggcggagcgtgttatgaggctaagaga

SEQ ID NO: 4242 - DNA, 30 bp, Rutstroemia sp.
  source 1..30: mol_type = other DNA; note = NJR-2017a BBW
tggtgcggacgcccaggccaaccctgcaaa

SEQ ID NO: 4243 - DNA, 33 bp, Rutstroemia sp.
  source 1..33: mol_type = other DNA; note = NJR-2017a BBW
tggtgcggacgcccaggacagccctgcaagcgt

SEQ ID NO: 4244 - DNA, 42 bp, Rutstroemia sp.
  source 1..42: mol_type = other DNA; note = NJR-2017a BBW
tggtgtggacgtccagggcagccgtgtaggaaggcgaagaga

SEQ ID NO: 4245 - DNA, 63 bp, Rutstroemia sp.
  source 1..63: mol_type = other DNA; note = NJR-2017a BVV2
ttcgatgaggcggttgtgaagagatgtaatatggttggaggagcttgttatgaggcgaagagg

SEQ ID NO: 4246 - DNA, 30 bp, Rutstroemia sp.
  source 1..30: mol_type = other DNA; note = NJR-2017a BVV2
tggtgcggacgtcccggacaaccgtgcaag

SEQ ID NO: 4247 - DNA, 33 bp, Rutstroemia sp.
  source 1..33: mol_type = other DNA; note = NJR-2017a BVV2
tggtgcggacgtcccggacaaccgtgcaagcgg

SEQ ID NO: 4248 - DNA, 42 bp, Rutstroemia sp.
  source 1..42: mol_type = other DNA; note = NJR-2017a BVV2
tggtgtggacgtcctggccagccttgtcgtaaggcgaagaga

SEQ ID NO: 4249 - DNA, 42 bp, Rutstroemia sp.
  source 1..42: mol_type = other DNA; note = NJR-2017a BVV2
tggtgcggacgcccaggacagccatgccgcaaagtgcgacgt

SEQ ID NO: 4250 - DNA, 63 bp, Rutstroemia sp.
  source 1..63: mol_type = other DNA; note = NJR-2017a WRK4
tctcttagcctcataacatgctccccccaccatattacacctcttcacaaccgcctcatcgaa

SEQ ID NO: 4251 - DNA, 30 bp, Rutstroemia sp.
  source 1..30: mol_type = other DNA; note = NJR-2017a WRK4
cttgcaaggctgtccgggacgaccgcacca

SEQ ID NO: 4252 - DNA, 33 bp, Rutstroemia sp.
  source 1..33: mol_type = other DNA; note = NJR-2017a WRK4
ccgcttgcacggttgtccgggacggccgcacca

SEQ ID NO: 4253 - DNA, 42 bp, Rutstroemia sp.
  source 1..42: mol_type = other DNA; note = NJR-2017a WRK4
tctcttcgccttcctacacggctgccctggacgaccacacca

SEQ ID NO: 4254 - DNA, 42 bp, Saccharata proteae
  source 1..42: mol_type = other DNA; strain = CBS 121410
acgcttggccttggagcagggttgaccggggagatggcagaa

SEQ ID NO: 4255 - DNA, 42 bp, Saccharata proteae
  source 1..42: mol_type = other DNA; strain = CBS 121410
acgcttcagcttggagcaaggctggccgggcaagtggcagaa

SEQ ID NO: 4256 - DNA, 42 bp, Saccharata proteae
  source 1..42: mol_type = other DNA; strain = CBS 121410
acgcttggtcttggagcagggctggccgggaaggtggcagaa

SEQ ID NO: 4257 - DNA, 42 bp, Sclerotinia borealis
  source 1..42: mol_type = other DNA; strain = F-4128
agatgcaacatggtcggtggtgcttgcttcgaggccaagaga

SEQ ID NO: 4258 - DNA, 30 bp, Sclerotinia borealis
  source 1..30: mol_type = other DNA; strain = F-4128
tggtgcggacgccccggacaaccatgcaag

SEQ ID NO: 4259 - DNA, 39 bp, Sclerotinia borealis
  source 1..39: mol_type = other DNA; strain = F-4128
tggtgcggacgccctggacaaccatgtaaggagaagcgt

SEQ ID NO: 4260 - DNA, 33 bp, Sclerotinia borealis; identical to SEQ ID NO: 3677
  source 1..33: mol_type = other DNA; strain = F-4128

SEQ ID NO: 4261 - DNA, 42 bp, Sclerotinia borealis
  source 1..42: mol_type = other DNA; strain = F-4128
tggtgcggacgcccaggtcaaccttgccgcaaggctaagaga

SEQ ID NO: 4262 - DNA, 42 bp, Sclerotinia borealis
  source 1..42: mol_type = other DNA; strain = F-4128
tggtgcggacgccccggacaaccatgccgcaagaacaagcgc

SEQ ID NO: 4263 - DNA, 42 bp, Sclerotinia sclerotiorum
  source 1..42: mol_type = other DNA
tctcttagcctcgaagcaagcaccaccaaccatgttgcatct

SEQ ID NO: 4264 - DNA, 30 bp, Sclerotinia sclerotiorum
  source 1..30: mol_type = other DNA
cttacaaggttgaccaggacgtccgcacca

SEQ ID NO: 4265 - DNA, 33 bp, Sclerotinia sclerotiorum
  source 1..33: mol_type = other DNA
acgcttgcatggttgaccgggacgtccgcacca

SEQ ID NO: 4266 - DNA, 42 bp, Sclerotinia sclerotiorum
  source 1..42: mol_type = other DNA
tctcttagccttgcgacaaggttgaccgggacgaccgcacca

SEQ ID NO: 4267 - DNA, 42 bp, Sclerotinia sclerotiorum
  source 1..42: mol_type = other DNA
acgcttgttcttgcggcaaggttgaccagggcgtccgcacca

SEQ ID NO: 4268 - DNA, 39 bp, Sclerotinia sclerotiorum
  source 1..39: mol_type = other DNA
tgcaacatggttggtggtgcttgcttcgaggctaagaga

SEQ ID NO: 4269 - DNA, 30 bp, Sclerotinia sclerotiorum
  source 1..30: mol_type = other DNA
tggtgcggacgcccaggccaaccatgcaag

SEQ ID NO: 4270 - DNA, 33 bp, Sclerotinia sclerotiorum
  source 1..33: mol_type = other DNA
tggtgcggacgcccaggccaaccatgcaagcgc

SEQ ID NO: 4271 - DNA, 42 bp, Sclerotinia sclerotiorum
  source 1..42: mol_type = other DNA
tggtgcggtcgtcccggtcaaccttgtcgcaaggctaagaga

SEQ ID NO: 4272 - DNA, 42 bp, Sclerotinia sclerotiorum
  source 1..42: mol_type = other DNA
tggtgcggacgccctggtcaaccttgccgcaagaacaagcgt

SEQ ID NO: 4273 - DNA, 39 bp, Sodiomyces alkalinus
  source 1..39: mol_type = other DNA
tgcaccaagcccggccaaccgtgctggaagaacaagcgt

SEQ ID NO: 4274 - DNA, 30 bp, Sodiomyces alkalinus
  source 1..30: mol_type = other DNA
tgcaccaagcccggccaaccgtgctggaag

SEQ ID NO: 4275 - DNA, 33 bp, Sordaria macrospora; identical to SEQ ID NO: 4047
  source 1..33: mol_type = other DNA

SEQ ID NO: 4276 - DNA, 45 bp, Sordaria macrospora
  source 1..45: mol_type = other DNA
tggtgccggatccatggccagtcgtgctggaagaaggccaagcgc

SEQ ID NO: 4277 - DNA, 36 bp, Sordaria macrospora
  source 1..36: mol_type = other DNA
tggtgccggatccatggccagtcgtgctggaagaag

SEQ ID NO: 4278 - DNA, 36 bp, Sordaria macrospora
  source 1..36: mol_type = other DNA
tggtgccgcatccacggccagtcctgctggaagcgc

SEQ ID NO: 4279 - DNA, 33 bp, Sordaria macrospora; identical to SEQ ID NO: 4047
  source 1..33: mol_type = other DNA

SEQ ID NO: 4280 - DNA, 33 bp, Sordaria macrospora; identical to SEQ ID NO: 4047
  source 1..33: mol_type = other DNA

SEQ ID NO: 4281 - DNA, 45 bp, Sordaria macrospora; identical to SEQ ID NO: 4276
  source 1..45: mol_type = other DNA

SEQ ID NO: 4282 - DNA, 36 bp, Sordaria macrospora; identical to SEQ ID NO: 4277
  source 1..36: mol_type = other DNA

SEQ ID NO: 4283 - DNA, 36 bp, Sordaria macrospora; identical to SEQ ID NO: 4278
  source 1..36: mol_type = other DNA

SEQ ID NO: 4284 - DNA, 33 bp, Sordaria macrospora; identical to SEQ ID NO: 4047
  source 1..33: mol_type = other DNA

SEQ ID NO: 4285 - DNA, 42 bp, unidentified
  misc_feature 1..42: note = TPA: Pheromone PPGAPutative uncharacterized protein
  source 1..42: mol_type = other DNA
acgcttggtcggggggcagattctaccggcgaatctgcacca

SEQ ID NO: 4286 - DNA, 42 bp, unidentified
  misc_feature 1..42: note = TPA: Pheromone PPGAPutative uncharacterized protein
  source 1..42: mol_type = other DNA
acgtttggccttgccacaaacctggccacggaacctgcacca

SEQ ID NO: 4287 - DNA, 33 bp, Sporothrix brasiliensis
  source 1..33: mol_type = other DNA
cttccaacaggactggcctttcagggggcagta

SEQ ID NO: 4288 - DNA, 33 bp, Sporothrix brasiliensis
  source 1..33: mol_type = other DNA
cttccagcaggactggcccttcagggggcaata

SEQ ID NO: 4289 - DNA, 42 bp, Sporothrix brasiliensis
  source 1..42: mol_type = other DNA
gcgcttgttcttccagcacggctggccgggcaggggacagta

SEQ ID NO: 4290 - DNA, 42 bp, Sporothrix brasiliensis
  source 1..42: mol_type = other DNA
gcgcttgacctggtaacacgactggccggcctgctgacagta

SEQ ID NO: 4291 - DNA, 39 bp, Sporothrix insectorum
  source 1..39: mol_type = other DNA
tgctacgggcccggcggccactgtgccgcggccaagcgg

SEQ ID NO: 4292 - DNA, 42 bp, Sporothrix insectorum
  source 1..42: mol_type = other DNA
ttctgcatgtggttcggccagtcctgctggaaggtcaagcgc

SEQ ID NO: 4293 - DNA, 39 bp, Sporothrix insectorum
  source 1..39: mol_type = other DNA
ttttgcatgtggtttggccagtcctgctggaggaagcgc

SEQ ID NO: 4294 - DNA, 33 bp, Sporothrix schenckii
  source 1..33: mol_type = other DNA
tactgccccctgaaaggccagtcctgctggaag

SEQ ID NO: 4295 - DNA, 42 bp, Sporothrix schenckii
  source 1..42: mol_type = other DNA
tactgtcccctgcccggccagccgtgctggaagaacaagcgc

SEQ ID NO: 4296 - DNA, 42 bp, Sporothrix schenckii
  source 1..42: mol_type = other DNA
tactgccagtcggtcggccagtcgtgttaccaggtcaagcgc

SEQ ID NO: 4297 - DNA, 33 bp, Sporothrix schenckii
  source 1..33: mol_type = other DNA
cttccagcaggactggcctttcagggggcagta

SEQ ID NO: 4298 - DNA, 42 bp, Sporothrix schenckii; identical to SEQ ID NO: 4289
  source 1..42: mol_type = other DNA

SEQ ID NO: 4299 - DNA, 42 bp, Sporothrix schenckii
  source 1..42: mol_type = other DNA
gcgcttgacctggtaacacgactggccgaccgactggcagta

SEQ ID NO: 4300 - DNA, 30 bp, Stachybotrys chartarum
  source 1..30: mol_type = other DNA
ccagcacggctggccggggcgcgtgcacca

SEQ ID NO: 4301 - DNA, 39 bp, Stachybotrys chartarum
  source 1..39: mol_type = other DNA
acgcttcttccagcatggctggccggggcgcgtgcacca

SEQ ID NO: 4302 - DNA, 42 bp, Stachybotrys chartarum
  source 1..42: mol_type = other DNA
gcgcttgaccttccagcacggctggccgggacggacgcacca

SEQ ID NO: 4303 - DNA, 30 bp, Stachybotrys chartarum; identical to SEQ ID NO: 4300
  source 1..30: mol_type = other DNA

SEQ ID NO: 4304 - DNA, 39 bp, Stachybotrys chartarum; identical to SEQ ID NO: 4301
  source 1..39: mol_type = other DNA

SEQ ID NO: 4305 - DNA, 42 bp, Stachybotrys chartarum; identical to SEQ ID NO: 4302
  source 1..42: mol_type = other DNA

SEQ ID NO: 4306 - DNA, 42 bp, Stachybotrys chartarum
  source 1..42: mol_type = other DNA
tggtgcacacgtcccgggcagccgtgctggaaggccaagcgc

SEQ ID NO: 4307 - DNA, 39 bp, Stachybotrys chartarum
  source 1..39: mol_type = other DNA
tggtgcacgcgccccggccagccatgctggaagaagcgt

SEQ ID NO: 4308 - DNA, 42 bp, Stachybotrys chartarum
  source 1..42: mol_type = other DNA
tggtgcgtccgtcccggccagccgtgctggaaggtcaagcgc

SEQ ID NO: 4309 - DNA, 30 bp, Stachybotrys chlorohalonata
  source 1..30: mol_type = other DNA
ccagcacggctggccgggacgcgtgcacca

SEQ ID NO: 4310 - DNA, 42 bp, Stachybotrys chlorohalonata
  source 1..42: mol_type = other DNA
acgcttctccttccagcatggctgaccgggacgcgtgcacca

SEQ ID NO: 4311 - DNA, 42 bp, Stachybotrys chlorohalonata; identical to SEQ ID NO: 4302
  source 1..42: mol_type = other DNA

SEQ ID NO: 4312 - DNA, 39 bp, Thermothielavioides terrestris
  source 1..39: mol_type = other DNA
tgcgagagcgagggcaacgcgtgctggaccgccaagcgc

SEQ ID NO: 4313 - DNA, 39 bp, Thermothielavioides terrestris
  source 1..39: mol_type = other DNA
atgtgcagccggttcgtgggcgagtcgtgctacaagcgc

SEQ ID NO: 4314 - DNA, 42 bp, Thermothielavioides terrestris
  source 1..42: mol_type = other DNA
tggtgctccaccgaaggccagccctgcgacacggtcaagcgc

SEQ ID NO: 4315 - DNA, 45 bp, Thermothielavioides terrestris
  source 1..45: mol_type = other DNA
tggtgcaccttcttcctcggccagccctgctggaagaacaagcgg

SEQ ID NO: 4316 - DNA, 36 bp, Thermothielavioides terrestris
  source 1..36: mol_type = other DNA
tggtgcaccttcttcctcggccagccctgctggaag

SEQ ID NO: 4317 - DNA, 45 bp, Tothia fuscella
  source 1..45: mol_type = other DNA
acgcttggctttaccgcagggttggccacggcggaagcatctcca

SEQ ID NO: 4318 - DNA, 45 bp, Tothia fuscella
  source 1..45: mol_type = other DNA
acgcttgagtttaccgcagggttggccacgacggaagcatcgcca

SEQ ID NO: 4319 - DNA, 45 bp, Tothia fuscella
  source 1..45: mol_type = other DNA
gcgcttgaccttcccgcaaggttgtccacggcggaaacatctcca

SEQ ID NO: 4320 - DNA, 42 bp, Trichoderma arundinaceum
  source 1..42: mol_type = other DNA
tggtgctatcgcattggtgagccgtgctggaaggctaagcga

SEQ ID NO: 4321 - DNA, 42 bp, Trichoderma arundinaceum
  source 1..42: mol_type = other DNA
tggtgctaccgtatcggcgagccctgttggaaggtcaagcgc

SEQ ID NO: 4322 - DNA, 42 bp, Trichoderma arundinaceum
  source 1..42: mol_type = other DNA
tggtgctaccgcatcggccagccctgctggaaggccaagcgc

SEQ ID NO: 4323 - DNA, 42 bp, Trichoderma asperellum
  source 1..42: mol_type = other DNA
acgcttggccttccaacaagactcgccaacgcgccagcacca

SEQ ID NO: 4324 - DNA, 42 bp, Trichoderma asperellum
  source 1..42: mol_type = other DNA
acgcttagccttccagcaggactcgccaacacgccagcacca

SEQ ID NO: 4325 - DNA, 42 bp, Trichoderma atroviride
  source 1..42: mol_type = other DNA
acgcttggccttccagcaggactcgccgacacgccagcacca

SEQ ID NO: 4326 - DNA, 42 bp, Trichoderma citrinoviride
  source 1..42: mol_type = other DNA
gcgcttggtcttccagcactgtcttccgaggatgaagcacca

SEQ ID NO: 4327 - DNA, 42 bp, Trichoderma citrinoviride
  source 1..42: mol_type = other DNA
gcgcttggccttccagcagggctcaccgatgcggtagcacca

SEQ ID NO: 4328 - DNA, 42 bp, Trichoderma citrinoviride
  source 1..42: mol_type = other DNA
gcgcttgagcttccagcagggctcgccgattcggtagcacca

SEQ ID NO: 4329 - DNA, 42 bp, Trichoderma citrinoviride
  source 1..42: mol_type = other DNA
gcgcttggccttccagcaaggctggccaatgcggtagcacca

SEQ ID NO: 4330 - DNA, 42 bp, Trichoderma gamsii
  source 1..42: mol_type = other DNA
tggtgctggagagtcggcgagtcttgctggaaggccaagcga

SEQ ID NO: 4331 - DNA, 42 bp, Trichoderma gamsii; identical to SEQ ID NO: 4325
  source 1..42: mol_type = other DNA

SEQ ID NO: 4332 - DNA, 39 bp, Trichoderma guizhouense
  source 1..39: mol_type = other DNA
acgcttggccttctggcagtctccgccgttctggaagca

SEQ ID NO: 4333 - DNA, 42 bp, Trichoderma guizhouense
  source 1..42: mol_type = other DNA
gcgctgagccttccagcagggctggccaacgctgttgcacat

SEQ ID NO: 4334 - DNA, 42 bp, Trichoderma guizhouense
  source 1..42: mol_type = other DNA
tcgcttgggaatccagcaaccctctccgatgcggtagcacca

SEQ ID NO: 4335 - DNA, 42 bp, Trichoderma guizhouense
  source 1..42: mol_type = other DNA
tctcttggggatccagcaaggcgttccgatgcggtagcacca

SEQ ID NO: 4336 - DNA, 42 bp, Trichoderma guizhouense
  source 1..42: mol_type = other DNA
tcgcttgggaatccagcaaccctctccgacgcggtagcacca

SEQ ID NO: 4337 - DNA, 42 bp, Trichoderma harzianum
  source 1..42: mol_type = other DNA
atgtgcaacagcgttggccagccctgctggaaggctgagcgc

SEQ ID NO: 4338 - DNA, 42 bp, Trichoderma harzianum
  source 1..42: mol_type = other DNA
tggtgctacttactgggaatgccttgctggatccccaagaga

SEQ ID NO: 4339 - DNA, 42 bp, Trichoderma harzianum
  source 1..42: mol_type = other DNA
tggtgctaccgcatcggagagagctgctggatccccaagcga

SEQ ID NO: 4340 - DNA, 39 bp, Trichoderma harzianum; identical to SEQ ID NO: 4332
  source 1..39: mol_type = other DNA

SEQ ID NO: 4341 - DNA, 42 bp, Trichoderma harzianum
  source 1..42: mol_type = other DNA
gcgttgggccttccagcagggctggccgacgctgttgcacat

SEQ ID NO: 4342 - DNA, 42 bp, Trichoderma harzianum
  source 1..42: mol_type = other DNA
tcgcttggggacccagcaaggctcgccagggcggtagcacca

SEQ ID NO: 4343 - DNA, 42 bp, Trichoderma harzianum
  source 1..42: mol_type = other DNA
tctcttggggatccagcaaggcattccgacgcggtagcacca

SEQ ID NO: 4344 - DNA, 39 bp, Trichoderma harzianum
  source 1..39: mol_type = other DNA
acgcttggccttccagcagtctccgccgttctggaagca

SEQ ID NO: 4345 - DNA, 42 bp, Trichoderma harzianum
  source 1..42: mol_type = other DNA
acgcttgatcttccagcagggctcgccgatgcggtagcacca

SEQ ID NO: 4346 - DNA, 42 bp, Trichoderma harzianum
  source 1..42: mol_type = other DNA
tcgcttgggaatccagcaaggcattccgatgcggtagcacca

SEQ ID NO: 4347 - DNA, 42 bp, Trichoderma harzianum; identical to SEQ ID NO: 4329
  source 1..42: mol_type = other DNA

SEQ ID NO: 4348 - DNA, 39 bp, Trichoderma harzianum
  source 1..39: mol_type = other DNA
tgcttccagaacggcggagactgccagaaggccaagcgt

SEQ ID NO: 4349 - DNA, 42 bp, Trichoderma harzianum
  source 1..42: mol_type = other DNA
atgtgcaacagcgtcggccagccctgctggaaggcccaacgc

SEQ ID NO: 4350 - DNA, 42 bp, Trichoderma harzianum
  source 1..42: mol_type = other DNA
tggtgctaccgccctggcgagccttgctgggtccccaagcga

SEQ ID NO: 4351 - DNA, 42 bp, Trichoderma lentiforme
  source 1..42: mol_type = other DNA
gcgctcagccttccagcagggctggccaacgctgttgcacat

SEQ ID NO: 4352 - DNA, 42 bp, Trichoderma lentiforme
  source 1..42: mol_type = other DNA
tcgcttgggaacccagcaagacattccgatgcggtagcacca

SEQ ID NO: 4353 - DNA, 42 bp, Trichoderma lentiforme
  source 1..42: mol_type = other DNA
tctcttggggacccagcaaggcattcccaggcggtagcacca

SEQ ID NO: 4354 - DNA, 42 bp, Trichoderma lentiforme; identical to SEQ ID NO: 4342
  source 1..42: mol_type = other DNA

SEQ ID NO: 4355 - DNA, 42 bp, Trichoderma longibrachiatum
  source 1..42: mol_type = other DNA
tggtgctaccgcatcggcgagccctgctggaaggccaagcgc

SEQ ID NO: 4356 - DNA, 42 bp, Trichoderma longibrachiatum
  source 1..42: mol_type = other DNA
tggtgctaccgcatcggcgagccctgctggaagatcaagcgc

SEQ ID NO: 4357 - DNA, 42 bp, Trichoderma longibrachiatum
  source 1..42: mol_type = other DNA
tggtgctaccgtgttggacagccttgctggaaggccaagcgc

SEQ ID NO: 4358 - DNA, 42 bp, Trichoderma parareesei
  source 1..42: mol_type = other DNA
gcgcttggtcttccagcactttcctccgaggatccagcacca

SEQ ID NO: 4359 - DNA, 42 bp, Trichoderma parareesei
  source 1..42: mol_type = other DNA
gcgcttggccttccagcaaggctcgccgatgcggtagcacca

SEQ ID NO: 4360 - DNA, 42 bp, Trichoderma parareesei
  source 1..42: mol_type = other DNA
gcgcttgagcttccagcagggctcgccgatgcggtagcacca

SEQ ID NO: 4361 - DNA, 42 bp, Trichoderma reesei; identical to SEQ ID NO: 4358
  source 1..42: mol_type = other DNA

SEQ ID NO: 4362 - DNA, 42 bp, Trichoderma reesei; identical to SEQ ID NO: 4359
  source 1..42: mol_type = other DNA

SEQ ID NO: 4363 - DNA, 42 bp, Trichoderma reesei; identical to SEQ ID NO: 4360
  source 1..42: mol_type = other DNA

SEQ ID NO: 4364 - DNA, 42 bp, Trichoderma reesei
  source 1..42: mol_type = other DNA
tggtgctggatcctcggaggaaagtgctggaagaccaagcgc

SEQ ID NO: 4365 - DNA, 42 bp, Trichoderma reesei; identical to SEQ ID NO: 4355
  source 1..42: mol_type = other DNA

SEQ ID NO: 4366 - DNA, 42 bp, Trichoderma reesei
  source 1..42: mol_type = other DNA
tggtgctaccgcatcggcgagccctgctggaagctcaagcgc

SEQ ID NO: 4367 - DNA, 39 bp, Trichoderma virens
  source 1..39: mol_type = other DNA
tgcaaccaaatcggccagccttgttggaaggtcaagcgt

SEQ ID NO: 4368 - DNA, 42 bp, Trichoderma virens
  source 1..42: mol_type = other DNA
tggtgctaccaaaccggccagccttgctggaaggccaagcgc

SEQ ID NO: 4369 - DNA, 45 bp, Trichoderma virens
  source 1..45: mol_type = other DNA
tggtgctaccgcgtcggtatgacttgcggctggaagaagaagcga

SEQ ID NO: 4370 - DNA, 45 bp, Trichoderma virens
  source 1..45: mol_type = other DNA
tggtgctaccgcgtcggtatgacttgcggctggaagaacaagcga

SEQ ID NO: 4371 - DNA, 33 bp, Ustilaginoidea virens
  source 1..33: mol_type = other DNA
tggtgcgaccgcccaggggagccatgctggaag

SEQ ID NO: 4372 - DNA, 42 bp, Ustilaginoidea virens
  source 1..42: mol_type = other DNA
tggtgcgaccgcccaggggagccatgctggaaggtcaagaga

SEQ ID NO: 4373 - DNA, 42 bp, Ustilaginoidea virens
  source 1..42: mol_type = other DNA
tggtgcgatcgtcccgggcaaccatgctggaaagtcaagaga

SEQ ID NO: 4374 - DNA, 42 bp, Ustilaginoidea virens
  source 1..42: mol_type = other DNA
tggtgctggcgacccggtgaaccctgctggaaagtaaagaga

SEQ ID NO: 4375 - DNA, 42 bp, Ustilaginoidea virens
  source 1..42: mol_type = other DNA
tggtgctggcgtccgggtcagccgtgctggaaggccaagcgt

SEQ ID NO: 4376 - DNA, 33 bp, Ustilaginoidea virens
  source 1..33: mol_type = other DNA
cttccagcatggctcccctgggcggtcgcacca

SEQ ID NO: 4377 - DNA, 33 bp, Ustilaginoidea virens
  source 1..33: mol_type = other DNA
cttccagcatggctctccgggccggtcgcacca

SEQ ID NO: 4378 - DNA, 42 bp, Ustilaginoidea virens
  source 1..42: mol_type = other DNA
tctcttgactttccagcatggttgcccgggacgatcgcacca

SEQ ID NO: 4379 - DNA, 42 bp, Ustilaginoidea virens
  source 1..42: mol_type = other DNA
tctctttactttccagcagggttcaccgggtcgccagcacca

SEQ ID NO: 4380 - DNA, 42 bp, Ustilaginoidea virens
  source 1..42: mol_type = other DNA
acgcttggccttccagcacggctgacccggacgccagcacca

SEQ ID NO: 4381 - DNA, 42 bp, Valsa malicola
  source 1..42: mol_type = other DNA
tcgtgcgagcagcccggcgaggcgtgcaacaaggcgcgccgc

SEQ ID NO: 4382 - DNA, 36 bp, Valsa malicola
  source 1..36: mol_type = other DNA
tggtgcctgctcaagggccaaggctgctggaagcgt

SEQ ID NO: 4383 - DNA, 42 bp, Valsa malicola
  source 1..42: mol_type = other DNA
tggtgcctgatgaagggccagggctgctggaaggtcaagcgt

SEQ ID NO: 4384 - DNA, 42 bp, Valsa mali
  source 1..42: mol_type = other DNA
gcggcgcgccttgtagcaggcctcgccgggctgctcgcagga

SEQ ID NO: 4385 - DNA, 36 bp, Valsa mali
  source 1..36: mol_type = other DNA
ccgcttccagcagccctcgcccttgaacaggcacca

SEQ ID NO: 4386 - DNA, 42 bp, Valsa mali
  source 1..42: mol_type = other DNA
acgcttaaccttccagcagccctcgcccttgaacaggcacca

SEQ ID NO: 4387 - DNA, 39 bp, Valsa mali
  source 1..39: mol_type = other DNA
tgcgagcagcccggcgaggcctgctacaaggcgcgccgc

SEQ ID NO: 4388 - DNA, 36 bp, Valsa mali
  source 1..36: mol_type = other DNA
tggtgcctcttcaagggcgagggctgctggaagcgc

SEQ ID NO: 4389 - DNA, 33 bp, Valsa mali
  source 1..33: mol_type = other DNA
tggtgcctcttcaagggcgagggctgctggaag

SEQ ID NO: 4390 - DNA, 51 bp, Valsa sordida
  source 1..51: mol_type = other DNA
ttctgccccttcggcggcgaggccggcagcacgtgctacgcctccaagcgc

SEQ ID NO: 4391 - DNA, 36 bp, Valsa sordida
  source 1..36: mol_type = other DNA
tggtgcctcctcaagggccagggctgctggaagcgc

SEQ ID NO: 4392 - DNA, 33 bp, Valsa sordida
  source 1..33: mol_type = other DNA
tggtgcctcctcaagggccagggctgctggaag

SEQ ID NO: 4393 - DNA, 30 bp, Venustampulla echinocandica
  source 1..30: mol_type = other DNA
cttccagcagccttgtccaacgtgggtgca

SEQ ID NO: 4394 - DNA, 36 bp, Venustampulla echinocandica
  source 1..36: mol_type = other DNA
cttctccttccagcagccctggccaacatgggtaca

SEQ ID NO: 4395 - DNA, 30 bp, Venustampulla echinocandica
  source 1..30: mol_type = other DNA
cttccagcagccttggccgacgtgggtgca

SEQ ID NO: 4396 - DNA, 39 bp, Verticillium alfalfae
  source 1..39: mol_type = other DNA
acgcttggccttccagcagccctgtccgggacgggggca

SEQ ID NO: 4397 - DNA, 39 bp, Verticillium alfalfae
  source 1..39: mol_type = other DNA
gcgcttgttcttccagcagccctgtccaggtcgggggca

SEQ ID NO: 4398 - DNA, 39 bp, Verticillium dahliae
  source 1..39: mol_type = other DNA
tgcccccgacctggacagggctgctggaaggccaagcgt

SEQ ID NO: 4399 - DNA, 39 bp, Verticillium dahliae
  source 1..39: mol_type = other DNA
tgcccccgacctggacagggttgctggaagaacaagcgc

SEQ ID NO: 4400 - DNA, 39 bp, Verticillium dahliae; identical to SEQ ID NO: 4398
  source 1..39: mol_type = other DNA

SEQ ID NO: 4401 - DNA, 39 bp, Verticillium dahliae; identical to SEQ ID NO: 4399
  source 1..39: mol_type = other DNA

SEQ ID NO: 4402 - DNA, 39 bp, Verticillium dahliae; identical to SEQ ID NO: 4398
  source 1..39: mol_type = other DNA

SEQ ID NO: 4403 - DNA, 39 bp, Verticillium dahliae; identical to SEQ ID NO: 4399
  source 1..39: mol_type = other DNA

SEQ ID NO: 4404 - DNA, 39 bp, Verticillium dahliae; identical to SEQ ID NO: 4398
  source 1..39: mol_type = other DNA

SEQ ID NO: 4405 - DNA, 39 bp, Verticillium dahliae; identical to SEQ ID NO: 4399
  source 1..39: mol_type = other DNA

SEQ ID NO: 4406 - DNA, 39 bp, Verticillium dahliae; identical to SEQ ID NO: 4398
  source 1..39: mol_type = other DNA

SEQ ID NO: 4407 - DNA, 39 bp, Verticillium dahliae; identical to SEQ ID NO: 4399
  source 1..39: mol_type = other DNA

SEQ ID NO: 4408 - DNA, 39 bp, Verticillium dahliae
  source 1..39: mol_type = other DNA
acgcttggccttccagcagccctggccaggtcgggggca

SEQ ID NO: 4409 - DNA, 39 bp, Verticillium dahliae
  source 1..39: mol_type = other DNA
gcgcttgttcttccagcaaccctgtccaggtcgggggca

SEQ ID NO: 4410 - DNA, 39 bp, Verticillium dahliae; identical to SEQ ID NO: 4408
  source 1..39: mol_type = other DNA

SEQ ID NO: 4411 - DNA, 39 bp, Verticillium dahliae; identical to SEQ ID NO: 4409
  source 1..39: mol_type = other DNA

SEQ ID NO: 4412 - DNA, 39 bp, Verticillium dahliae
  source 1..39: mol_type = other DNA
tgcccccgacctggccagggctgctggaaggccaagcgt

SEQ ID NO: 4413 - DNA, 39 bp, Verticillium dahliae; identical to SEQ ID NO: 4399
  source 1..39: mol_type = other DNA

SEQ ID NO: 4414 - DNA, 39 bp, Verticillium dahliae; identical to SEQ ID NO: 4408
  source 1..39: mol_type = other DNA

SEQ ID NO: 4415 - DNA, 39 bp, Verticillium dahliae; identical to SEQ ID NO: 4409
  source 1..39: mol_type = other DNA

SEQ ID NO: 4416 - DNA, 39 bp, Verticillium dahliae; identical to SEQ ID NO: 4408
  source 1..39: mol_type = other DNA

SEQ ID NO: 4417 - DNA, 39 bp, Verticillium dahliae; identical to SEQ ID NO: 4409
  source 1..39: mol_type = other DNA

SEQ ID NO: 4418 - DNA, 39 bp, Verticillium longisporum; identical to SEQ ID NO: 4397
  source 1..39: mol_type = other DNA

SEQ ID NO: 4419 - DNA, 39 bp, Verticillium longisporum
  source 1..39: mol_type = other DNA
tcgcttgttcttccagcagccctgtccaggtcgggggca

SEQ ID NO: 4420 - DNA, 39 bp, Verticillium longisporum
  source 1..39: mol_type = other DNA
acgcttggccttccagcaaccctgtccaggtcgggagca

SEQ ID NO: 4421 - DNA, 39 bp, Verticillium longisporum
  source 1..39: mol_type = other DNA
gcgcttgttcttccagcacccctggccagggcgagagca

SEQ ID NO: 4422 - DNA, 39 bp, Verticillium longisporum
  source 1..39: mol_type = other DNA
tgcccccgacctggacagggctgctggaagaacaagcga

SEQ ID NO: 4423 - DNA, 39 bp, Verticillium longisporum
  source 1..39: mol_type = other DNA
tgctcacgccccggacagggttgctggaaggccaagcgt

SEQ ID NO: 4424 - DNA, 39 bp, Verticillium longisporum
  source 1..39: mol_type = other DNA
tgctctcgccctggccaggggtgctggaagaacaagcgc

SEQ ID NO: 4425 - DNA, 39 bp, Verticillium nonalfalfae
  source 1..39: mol_type = other DNA
acgcttggccttccagcagccctgtccaggacgggggca

SEQ ID NO: 4426 - DNA, 39 bp, Verticillium nonalfalfae; identical to SEQ ID NO: 4397
  source 1..39: mol_type = other DNA

SEQ ID NO: 4427 - DNA, 36 bp, Westerdykella ornata
  source 1..36: mol_type = other DNA
tgctggttccgcggccagccctgcaaggccaagcgt

SEQ ID NO: 4428 - DNA, 27 bp, Westerdykella ornata
  source 1..27: mol_type = other DNA
tgctggttccgcggccagccctgcaag

SEQ ID NO: 4429 - DNA, 39 bp, Westerdykella ornata
  source 1..39: mol_type = other DNA
tgctggttccgtgggcaaccctgccgcaagctcaagcgc

SEQ ID NO: 4430 - DNA, 39 bp, Westerdykella ornata
  source 1..39: mol_type = other DNA
tgctggttccgtggccagccctgctccaaggccaaacgc

SEQ ID NO: 4431 - DNA, 39 bp, Westerdykella ornata
  source 1..39: mol_type = other DNA
tgctggttccgtggtcagccatgctccaaggtcaagcgt

SEQ ID NO: 4432 - DNA, 42 bp, Xylona heveae
  source 1..42: mol_type = other DNA
acgcttggctttagagcatccctggcccggcagatggcagaa

SEQ ID NO: 4433 - DNA, 42 bp, Xylona heveae
  source 1..42: mol_type = other DNA
acgcttgagcttcgagcagccttgtccgggaagatggcagaa

SEQ ID NO: 4434 - DNA, 42 bp, Xylona heveae
  source 1..42: mol_type = other DNA
gcgcttgaccttagagcagccttggccgggaaggtgacagaa

SEQ ID NO: 4435 - DNA, 39 bp, Zasmidium cellare
  source 1..39: mol_type = other DNA
tgctccgagccaggtggtgactgtgatgttgccaagcgt

SEQ ID NO: 4436 - DNA, 42 bp, Zasmidium cellare
  source 1..42: mol_type = other DNA
ttctgcggtcttcccggagaagcttgctcccgagtcaagcgt

SEQ ID NO: 4437 - DNA, 42 bp, Zasmidium cellare
  source 1..42: mol_type = other DNA
ttctgcggtgtccccggcgaggcctgcgaggtcaccaagcgc

SEQ ID NO: 4438 - DNA, 42 bp, Zasmidium cellare
  source 1..42: mol_type = other DNA
tggaagtgcggcgtccccggccaagcctgcaacaagaagcgc

SEQ ID NO: 4439 - DNA, 42 bp, Zasmidium cellare
  source 1..42: mol_type = other DNA
tggaagtgtggtgtccctggccaagcctgcaacaggaagcgc

SEQ ID NO: 4440 - DNA, 42 bp, Zasmidium cellare
  source 1..42: mol_type = other DNA
tggaagtgcggtgtccgaggccaagcctgcaacaagaagaga

SEQ ID NO: 4441 - DNA, 42 bp, Zymoseptoria brevis
  source 1..42: mol_type = other DNA
tggtgcggtgccatcggcgccccctgtgccaaagccaagcgc

SEQ ID NO: 4442 - DNA, 42 bp, Zymoseptoria brevis
  source 1..42: mol_type = other DNA
tggtgcggtgccatcggcgctccttgtgccaaagacaagcgt

SEQ ID NO: 4443 - DNA, 33 bp, Zymoseptoria brevis
  source 1..33: mol_type = other DNA
tggtgcggtgccatcggcgccccctgtgccaaa

SEQ ID NO: 4444 - DNA, 42 bp, Zymoseptoria brevis
  source 1..42: mol_type = other DNA
tggtgcggtgccatcggtgccccatgcgccaaagtcaagcgt

SEQ ID NO: 4445 - DNA, 42 bp, Zymoseptoria brevis
  source 1..42: mol_type = other DNA
tggtgtggcgctatcggagcaccttgtgctcgcgtcaagcgt

SEQ ID NO: 4446 - DNA, 42 bp, Zymoseptoria brevis
  source 1..42: mol_type = other DNA
tggtgcggtgcccttggtgctccctgcgccaaagtcaagcgt

SEQ ID NO: 4447 - DNA, 33 bp, Zymoseptoria tritici
  source 1..33: mol_type = other DNA
cttggcgcaaggcgcaccaatggcaccgcacca

SEQ ID NO: 4448 - DNA, 42 bp, Zymoseptoria tritici
  source 1..42: mol_type = other DNA
acgcttgtctttggcacaaggagcgccgatggcaccgcacca

SEQ ID NO: 4449 - DNA, 36 bp, Zymoseptoria tritici
  source 1..36: mol_type = other DNA
gcgcttggcgcaaggcgcaccaatggcaccgcacca

SEQ ID NO: 4450 - DNA, 42 bp, Zymoseptoria tritici
  source 1..42: mol_type = other DNA
acgcttgactttggcgcatggggcaccgatggcaccgcacca

SEQ ID NO: 4451 - DNA, 42 bp, Zymoseptoria tritici
  source 1..42: mol_type = other DNA
acgcttgacgcgagcacaaggtgctccgatagcgccacacca

SEQ ID NO: 4452 - DNA, 42 bp, Zymoseptoria tritici
  source 1..42: mol_type = other DNA
acgcttgactttggcgcagggagcaccaagggcaccgcacca

SEQ ID NO: 4453 - DNA, 33 bp, Zymoseptoria tritici; identical to SEQ ID NO: 4447
  source 1..33: mol_type = other DNA

SEQ ID NO: 4454 - DNA, 42 bp, Zymoseptoria tritici; identical to SEQ ID NO: 4448
  source 1..42: mol_type = other DNA

SEQ ID NO: 4455 - DNA, 36 bp, Zymoseptoria tritici; identical to SEQ ID NO: 4449
  source 1..36: mol_type = other DNA

SEQ ID NO: 4456 - DNA, 42 bp, Zymoseptoria tritici; identical to SEQ ID NO: 4450
  source 1..42: mol_type = other DNA

SEQ ID NO: 4457 - DNA, 42 bp, Zymoseptoria tritici; identical to SEQ ID NO: 4451
  source 1..42: mol_type = other DNA

SEQ ID NO: 4458 - DNA, 42 bp, Zymoseptoria tritici; identical to SEQ ID NO: 4452
  source 1..42: mol_type = other DNA

SEQ ID NO: 4459 - DNA, 33 bp, Zymoseptoria tritici
  source 1..33: mol_type = other DNA
cttggcgcaaggcgcaccaattgcaccgcacca

SEQ ID NO: 4460 - DNA, 42 bp, Zymoseptoria tritici; identical to SEQ ID NO: 4448
  source 1..42: mol_type = other DNA

SEQ ID NO: 4461 - DNA, 36 bp, Zymoseptoria tritici
  source 1..36: mol_type = other DNA
gcgcttggcgcaaggcgcaccaattgcaccgcacca

SEQ ID NO: 4462 - DNA, 42 bp, Zymoseptoria tritici; identical to SEQ ID NO: 4450
  source 1..42: mol_type = other DNA

SEQ ID NO: 4463 - DNA, 42 bp, Zymoseptoria tritici; identical to SEQ ID NO: 4451
  source 1..42: mol_type = other DNA

SEQ ID NO: 4464 - DNA, 42 bp, Zymoseptoria tritici; identical to SEQ ID NO: 4452
  source 1..42: mol_type = other DNA

SEQ ID NO: 4465 - DNA, 33 bp, Zymoseptoria tritici; identical to SEQ ID NO: 4447
  source 1..33: mol_type = other DNA

SEQ ID NO: 4466 - DNA, 42 bp, Zymoseptoria tritici; identical to SEQ ID NO: 4448
  source 1..42: mol_type = other DNA

SEQ ID NO: 4467 - DNA, 36 bp, Zymoseptoria tritici; identical to SEQ ID NO: 4449
  source 1..36: mol_type = other DNA

SEQ ID NO: 4468 - DNA, 42 bp, Zymoseptoria tritici; identical to SEQ ID NO: 4450
  source 1..42: mol_type = other DNA

SEQ ID NO: 4469 - DNA, 42 bp, Zymoseptoria tritici; identical to SEQ ID NO: 4451
  source 1..42: mol_type = other DNA

SEQ ID NO: 4470 - DNA, 42 bp, Zymoseptoria tritici; identical to SEQ ID NO: 4452
  source 1..42: mol_type = other DNA

SEQ ID NO: 4471 - DNA, 33 bp, Botrytis fragariae; identical to SEQ ID NO: 3625
  source 1..33: mol_type = other DNA

SEQ ID NO: 4472 - DNA, 33 bp, Botrytis fragariae; identical to SEQ ID NO: 3625
  source 1..33: mol_type = other DNA

SEQ ID NO: 4473 - DNA, 33 bp, Botrytis galanthina
  source 1..33: mol_type = other DNA
acgcttacatggttgtccgggacgtccgcacca

SEQ ID NO: 4474 - DNA, 33 bp, Botrytis tulipae; identical to SEQ ID NO: 4473
  source 1..33: mol_type = other DNA

SEQ ID NO: 4475 - DNA, 39 bp, Pseudogymnoascus verrucosus
  source 1..39: mol_type = other DNA
acgcttagctttgccacatggctggccaggacgccagca

SEQ ID NO: 4476 - DNA, 42 bp, Pseudogymnoascus verrucosus
  source 1..42: mol_type = other DNA
acgcttagctttgccacatggctggccaggacgccagcagat

SEQ ID NO: 4477 - DNA, 24 bp, Pseudogymnoascus sp.
  source 1..24: mol_type = other DNA; note = 24MN13
acgcttagctttgccgcatggctg

SEQ ID NO: 4478 - DNA, 42 bp, Pseudogymnoascus sp.
  source 1..42: mol_type = other DNA; note = 24MN13
acgcttagctttgccgcatggctggccaggacgccagcagat

SEQ ID NO: 4479 - DNA, 36 bp, Diaporthe helianthi
  source 1..36: mol_type = other DNA
acgcttccagcagccctcgcccttccagaagcacca

SEQ ID NO: 4480 - DNA, 36 bp, Colletotrichum gloeosporioides; identical to SEQ ID NO: 3747
  source 1..36: mol_type = other DNA

SEQ ID NO: 4481 - DNA, 39 bp, Neurospora crassa
  source 1..39: mol_type = other DNA
acgcttcttccagcaggactggccgtggatgcggcacca

SEQ ID NO: 4482 - DNA, 39 bp, Neurospora crassa; identical to SEQ ID NO: 4481
  source 1..39: mol_type = other DNA

SEQ ID NO: 4483 - DNA, 42 bp, Lasiodiplodia theobromae
  source 1..42: mol_type = other DNA
acgcttcttgtggcaaggctggccgcggatgcggccgcagaa

SEQ ID NO: 4484 - DNA, 42 bp, Lasiodiplodia theobromae; identical to SEQ ID NO: 4483
  source 1..42: mol_type = other DNA

SEQ ID NO: 4485 - DNA, 42 bp, Botrytis fragariae; identical to SEQ ID NO: 3655
  source 1..42: mol_type = other DNA

SEQ ID NO: 4486 - DNA, 39 bp, Mollisia scopiformis
  source 1..39: mol_type = other DNA
acgcttgactttgccgcatggttgtcctgggtatccgca

SEQ ID NO: 4487 - DNA, 33 bp, Monilinia fructigena
  source 1..33: mol_type = other DNA
acgcttgcatccttgacctgggcgtccgcacca

SEQ ID NO: 4488 - DNA, 33 bp, Botrytis cinerea; identical to SEQ ID NO: 3627
  source 1..33: mol_type = other DNA

SEQ ID NO: 4489 - DNA, 33 bp, Botrytis cinerea; identical to SEQ ID NO: 3627
  source 1..33: mol_type = other DNA

SEQ ID NO: 4490 - DNA, 33 bp, Botrytis cinerea; identical to SEQ ID NO: 3627
  source 1..33: mol_type = other DNA

SEQ ID NO: 4491 - DNA, 42 bp, Coniochaeta pulveracea
  source 1..42: mol_type = other DNA
acgcttggacttccagcatggctggcctttgaaggggcacca

SEQ ID NO: 4492 - DNA, 42 bp, Aspergillus mulundensis
  source 1..42: mol_type = other DNA
acgcttggacttgtggcagacctgtccgggccacctgcacca

SEQ ID NO: 4493 - DNA, 33 bp, Lindgomyces ingoldianus
  source 1..33: mol_type = other DNA
acgcttggagcatggctgaccaacgagacggca

SEQ ID NO: 4494 - DNA, 36 bp, Lindgomyces ingoldianus
  source 1..36: mol_type = other DNA
acgcttggagcatggctgaccaacgagacggcagcg

SEQ ID NO: 4495 - DNA, 39 bp, Verticillium longisporum
  source 1..39: mol_type = other DNA
acgcttggccttccagcaaccctgtccggggcgtgagca

SEQ ID NO: 4496 - DNA, 39 bp, Verticillium dahliae
  source 1..39: mol_type = other DNA
acgcttggccttccagcagccctgtccaggtcgggggca

SEQ ID NO: 4497 - DNA, 39 bp, Verticillium dahliae; identical to SEQ ID NO: 4496
  source 1..39: mol_type = other DNA

SEQ ID NO: 4498 - DNA, 42 bp, Trichoderma asperellum
  source 1..42: mol_type = other DNA
acgcttggccttccagcaggactcgccaacacgccagcacca

SEQ ID NO: 4499 - DNA, 42 bp, Trichoderma asperellum
  source 1..42: mol_type = other DNA
acgcttggccttccagcaggactcgccaacgcgccagcacca

SEQ ID NO: 4500 - DNA, 39 bp, Pseudogymnoascus sp.
  source 1..39: mol_type = other DNA; note = VKM F-4514 (FW-929)
acgcttggccttgccacatggttgacctggacgccagca

SEQ ID NO: 4501 - DNA, 42 bp, Pseudogymnoascus sp.
  source 1..42: mol_type = other DNA; note = VKM F-4514 (FW-929)
acgcttggccttgccacatggttgacctggacgccagcagat

SEQ ID NO: 4502 - DNA, 42 bp, Pseudogymnoascus sp.
  source 1..42: mol_type = other DNA; note = 23342-1-I1
acgcttggccttgccgcatggctgaccggggcgccagcagaa

SEQ ID NO: 4503 - DNA, 39 bp, Helotiales sp.
  source 1..39: mol_type = other DNA; note = DMI_Dod_QoI
acgcttggcctttccacaaggttgtccggggtatccaca

SEQ ID NO: 4504 - DNA, 39 bp, Marssonina coronariae
  source 1..39: mol_type = other DNA
acgcttggcctttccgcaaggttgccctggctttccgca

SEQ ID NO: 4505 - DNA, 39 bp, Mollisia scopiformis
  source 1..39: mol_type = other DNA
acgcttggcctttccgcacggttgtcctgggtatccgca

SEQ ID NO: 4506 - DNA, 42 bp, Pseudogymnoascus sp.
  source 1..42: mol_type = other DNA; note = VKM F-4517 (FW-2822)
acgcttggcctttccgcatggctgaccggggcgccagcagta

SEQ ID NO: 4507 - DNA, 39 bp, Pseudogymnoascus sp.
  source 1..39: mol_type = other DNA; note = VKM F-4246
acgcttggctttgccacatggttgaccggggagccagca

SEQ ID NO: 4508 - DNA, 39 bp, Pseudogymnoascus sp.; identical to SEQ ID NO: 4507
  source 1..39: mol_type = other DNA; note = VKM F-4513 (FW-928)

SEQ ID NO: 4509 - DNA, 42 bp, Lophiostoma macrostomum
  source 1..42: mol_type = other DNA
acgcttggctttgccgcaaggttgtccgcggtagtggcagaa

SEQ ID NO: 4510 - DNA, 39 bp, Pseudogymnoascus sp.
  source 1..39: mol_type = other DNA; note = VKM F-3775
acgcttggctttgccgcatggctggccggggcgccagca

SEQ ID NO: 4511 - DNA, 42 bp, Metarhizium anisopliae; identical to SEQ ID NO: 3970
  source 1..42: mol_type = other DNA

SEQ ID NO: 4512 - DNA, 42 bp, Metarhizium anisopliae; identical to SEQ ID NO: 3970
  source 1..42: mol_type = other DNA

SEQ ID NO: 4513 - DNA, 42 bp, Metarhizium anisopliae; identical to SEQ ID NO: 3970
  source 1..42: mol_type = other DNA

SEQ ID NO: 4514 - DNA, 42 bp, Metarhizium anisopliae; identical to SEQ ID NO: 3970
  source 1..42: mol_type = other DNA

SEQ ID NO: 4515 - DNA, 39 bp, Lophium mytilinum
  source 1..39: mol_type = other DNA
acgcttttccttggagcaagattgacctgggagatggca

SEQ ID NO: 4516 - DNA, 30 bp, Botrytis fragariae
  source 1..30: mol_type = other DNA
acggcaaggttgtccgggacgtccgcacca

SEQ ID NO: 4517 - DNA, 33 bp, Botryotinia narcissicola
  source 1..33: mol_type = other DNA
acgtttacatggttgaccggggcgtccgcacca

SEQ ID NO: 4518 - DNA, 33 bp, Botrytis cinerea
  source 1..33: mol_type = other DNA
acgtttacatggttgtccggggcgtccacacca

SEQ ID NO: 4519 - DNA, 33 bp, Botrytis cinerea; identical to SEQ ID NO: 4518
  source 1..33: mol_type = other DNA

SEQ ID NO: 4520 - DNA, 33 bp, Botrytis cinerea; identical to SEQ ID NO: 4518
  source 1..33: mol_type = other DNA

SEQ ID NO: 4521 - DNA, 33 bp, Sclerotinia sclerotiorum
  source 1..33: mol_type = other DNA
acgtttgcagggttgtccggggcgtccgcacca

SEQ ID NO: 4522 - DNA, 33 bp, Botrytis cinerea
  source 1..33: mol_type = other DNA
acgtttgcagggttgtcctgggcgtccacacca

SEQ ID NO: 4523 - DNA, 33 bp, Botrytis cinerea; identical to SEQ ID NO: 4522
  source 1..33: mol_type = other DNA

SEQ ID NO: 4524 - DNA, 33 bp, Botrytis cinerea; identical to SEQ ID NO: 4522
  source 1..33: mol_type = other DNA

SEQ ID NO: 4525 - DNA, 33 bp, Monilinia fructicola
  source 1..33: mol_type = other DNA
acgtttgcatccttgaccagggcgtccgcacca

SEQ ID NO: 4526 - DNA, 30 bp, Delitschia confertaspora; identical to SEQ ID NO: 3796
  source 1..30: mol_type = other DNA

SEQ ID NO: 4527 - DNA, 27 bp, Lindgomyces ingoldianus
  source 1..27: mol_type = other DNA
agagcatggctggccgacgaggcggca

SEQ ID NO: 4528 - DNA, 27 bp, Lindgomyces ingoldianus
  source 1..27: mol_type = other DNA
agagcatggctggccgacgaggcggca

SEQ ID NO: 4529 - DNA, 36 bp, Dothistroma septosporum
  source 1..36: mol_type = other DNA
aggtgcaccgttccgggtctcgcatgcggtaagcgt

SEQ ID NO: 4530 - DNA, 42 bp, Pseudogymnoascus sp.
  source 1..42: mol_type = other DNA; note = VKM F-4519 (FW-2642)
atctgctggcgtccaggccagccgtgcggaaaagccaagcgc

SEQ ID NO: 4531 - DNA, 42 bp, Pseudogymnoascus sp.
  source 1..42: mol_type = other DNA; note = VKM F-103
atctgctggcgtccaggccagccgtgcggcaaagccaagcgc

SEQ ID NO: 4532 - DNA, 42 bp, Pseudogymnoascus sp.
  source 1..42: mol_type = other DNA; note = VKM F-3557
atctgctggcgtccaggtcaaccatgtggcaaggccaagcgt

SEQ ID NO: 4533 - DNA, 42 bp, Pseudogymnoascus sp.; identical to SEQ ID NO: 4532
  source 1..42: mol_type = other DNA; note = VKM F-4516 (FW-969)

SEQ ID NO: 4534 - DNA, 42 bp, Pseudogymnoascus sp.
  source 1..42: mol_type = other DNA; note = WSF 3629
atctgctggcgtcctggccagccatgtggcaaagctaagcgt

SEQ ID NO: 4535 - DNA, 42 bp, Pseudogymnoascus sp.
  source 1..42: mol_type = other DNA; note = 03VT05
atctgctggcgtcctggccagccatgtggtaaagctaagcgt

SEQ ID NO: 4536 - DNA, 42 bp, Pseudogymnoascus sp.
  source 1..42: mol_type = other DNA; note = 05NY08
atctgctggcgtcctggtcagccatgcggaaaagctaagcgt

SEQ ID NO: 4537 - DNA, 30 bp, Stachybotrys chlorohalonata; identical to SEQ ID NO: 4309
  source 1..30: mol_type = other DNA

SEQ ID NO: 4538 - DNA, 30 bp, Stachybotrys chartarum; identical to SEQ ID NO: 4300
  source 1..30: mol_type = other DNA

SEQ ID NO: 4539 - DNA, 30 bp, Stachybotrys chartarum; identical to SEQ ID NO: 4300
  source 1..30: mol_type = other DNA

SEQ ID NO: 4540 - DNA, 30 bp, Stachybotrys chlorohalonata; identical to SEQ ID NO: 4300
  source 1..30: mol_type = other DNA

SEQ ID NO: 4541 - DNA, 36 bp, Cryphonectria parasitica
  source 1..36: mol_type = other DNA
ccgcttccagcacccttcgccgtggaacaggcacca

SEQ ID NO: 4542 - DNA, 42 bp, Coniochaeta pulveracea
  source 1..42: mol_type = other DNA
ccgcttgttcttccagcatggttggccgggatgggggcacca

SEQ ID NO: 4543 - DNA, 36 bp, Colletotrichum fructicola; identical to SEQ ID NO: 3744
  source 1..36: mol_type = other DNA

SEQ ID NO: 4544 - DNA, 36 bp, Colletotrichum fructicola; identical to SEQ ID NO: 3744
  source 1..36: mol_type = other DNA

SEQ ID NO: 4545 - DNA, 36 bp, Colletotrichum fructicola; identical to SEQ ID NO: 3744
  source 1..36: mol_type = other DNA

SEQ ID NO: 4546 - DNA, 36 bp, Colletotrichum siamense; identical to SEQ ID NO: 3744
  source 1..36: mol_type = other DNA

SEQ ID NO: 4547 - DNA, 36 bp, Colletotrichum siamense; identical to SEQ ID NO: 3744
  source 1..36: mol_type = other DNA

SEQ ID NO: 4548 - DNA, 42 bp, Ophiocordyceps camponoti-floridani; identical to SEQ ID NO: 4056
  source 1..42: mol_type = other DNA

SEQ ID NO: 4549 - DNA, 42 bp, Ophiocordyceps camponoti-floridani
  source 1..42: mol_type = other DNA
cctcttcttggggccacactgcgagttgggacgtgtgcacca

SEQ ID NO: 4550 - DNA, 42 bp, Ophiocordyceps camponoti-floridani; identical to SEQ ID NO: 4549
  source 1..42: mol_type = other DNA

SEQ ID NO: 4551 - DNA, 42 bp, Ophiocordyceps camponoti-floridani; identical to SEQ ID NO: 4549
  source 1..42: mol_type = other DNA

SEQ ID NO: 4552 - DNA, 42 bp, Ophiocordyceps camponoti-rufipedis
  source 1..42: mol_type = other DNA
cctcttgaccttggagcagatggagttgggacgcttgcacca

SEQ ID NO: 4553 - DNA, 30 bp, Botrytis cinerea
  source 1..30: mol_type = other DNA
cttacatggctgtcctgggcgtccgcacca

SEQ ID NO: 4554 - DNA, 30 bp, Botrytis cinerea; identical to SEQ ID NO: 4553
  source 1..30: mol_type = other DNA

SEQ ID NO: 4555 - DNA, 30 bp, Botrytis cinerea; identical to SEQ ID NO: 4553
  source 1..30: mol_type = other DNA

SEQ ID NO: 4556 - DNA, 30 bp, Botrytis fragariae
  source 1..30: mol_type = other DNA
cttacatggttgaccagggcgtccacacca

SEQ ID NO: 4557 - DNA, 30 bp, Botryotinia narcissicola
  source 1..30: mol_type = other DNA
cttacatggttgaccgggacgtccgcacca

SEQ ID NO: 4558 - DNA, 30 bp, Botrytis galanthina
  source 1..30: mol_type = other DNA
cttacatggttgtccgggacgtccacacca

SEQ ID NO: 4559 - DNA, 30 bp, Botrytis tulipae; identical to SEQ ID NO: 4558
  source 1..30: mol_type = other DNA

SEQ ID NO: 4560 - DNA, 33 bp, Cryphonectria parasitica; identical to SEQ ID NO: 3792
  source 1..33: mol_type = other DNA

SEQ ID NO: 4561 - DNA, 33 bp, Metarhizium rileyi
  source 1..33: mol_type = other DNA
cttccagcaaggctgtcccggtcgccaacacca

SEQ ID NO: 4562 - DNA, 33 bp, Metarhizium rileyi; identical to SEQ ID NO: 4561
  source 1..33: mol_type = other DNA

SEQ ID NO: 4563 - DNA, 33 bp, Diaporthe helianthi
  source 1..33: mol_type = other DNA
cttccagcacccctcgcccttccagaagcacca

SEQ ID NO: 4564 - DNA, 33 bp, Valsa mali
  source 1..33: mol_type = other DNA
cttccagcacccttcacccttgaacaggcacca

SEQ ID NO: 4565 - DNA, 33 bp, Cryphonectria parasitica
  source 1..33: mol_type = other DNA
cttccagcacccttcgccgtggaacaggcacca

SEQ ID NO: 4566 - DNA, 33 bp, Neurospora crassa; identical to SEQ ID NO: 4036
  source 1..33: mol_type = other DNA

SEQ ID NO: 4567 - DNA, 33 bp, Neurospora crassa; identical to SEQ ID NO: 4036
  source 1..33: mol_type = other DNA

SEQ ID NO: 4568 - DNA, 33 bp, Sporothrix brasiliensis
  source 1..33: mol_type = other DNA
cttccagcacgactggcctttgagggggcagta

SEQ ID NO: 4569 - DNA, 33 bp, Neurospora crassa
  source 1..33: mol_type = other DNA
cttccagcacgattggccgtggatgcggcacca

SEQ ID NO: 4570 - DNA, 33 bp, Neurospora crassa; identical to SEQ ID NO: 4569
  source 1..33: mol_type = other DNA

SEQ ID NO: 4571 - DNA, 33 bp, Pyricularia sp.
  source 1..33: mol_type = other DNA; note = CBS 133598
cttccagcacggctgcccacggcgcgggcacca

SEQ ID NO: 4572 - DNA, 33 bp, Pyricularia grisea
  source 1..33: mol_type = other DNA
cttccagcacggctggccccggcgtgggcacca

SEQ ID NO: 4573 - DNA, 33 bp, Valsa mali
  source 1..33: mol_type = other DNA
cttccagcagccctcgcccttgaacaggcacca

SEQ ID NO: 4574 - DNA, 33 bp, Drechmeria coniospora
  source 1..33: mol_type = other DNA
cttccagcagccgctgccgggacgagtgcacca

SEQ ID NO: 4575 - DNA, 30 bp, Venustampulla echinocandica
  source 1..30: mol_type = other DNA
cttccagcagccttgtccgacgtgggtgca

SEQ ID NO: 4576 - DNA, 33 bp, Neurospora crassa
  source 1..33: mol_type = other DNA
cttccagcaggactggccatggatccggcacca

SEQ ID NO: 4577 - DNA, 33 bp, Neurospora crassa; identical to SEQ ID NO: 4576
  source 1..33: mol_type = other DNA

SEQ ID NO: 4578 - DNA, 33 bp, Pyricularia oryzae
  source 1..33: mol_type = other DNA
cttccagcagggctggccgcgacgcgggcacca

SEQ ID NO: 4579 - DNA, 33 bp, Pyricularia oryzae
  source 1..33: mol_type = other DNA
cttccagcagggctggccgcgccgggggcacca

SEQ ID NO: 4580 - DNA, 33 bp, Pyricularia grisea
  source 1..33: mol_type = other DNA
cttccagcagggctggccgcggcggggacacca

SEQ ID NO: 4581 - DNA, 33 bp, Pyricularia sp.
  source 1..33: mol_type = other DNA; note = CBS 133598
cttccagcagggctggccgcggcgggggcacca

SEQ ID NO: 4582 - DNA, 33 bp, Drechmeria coniospora; identical to SEQ ID NO: 3822
  source 1..33: mol_type = other DNA

SEQ ID NO: 4583 - DNA, 30 bp, Venustampulla echinocandica
  source 1..30: mol_type = other DNA
cttccagcatccttggccaacatgggtaca

SEQ ID NO: 4584 - DNA, 36 bp, Venustampulla echinocandica
  source 1..36: mol_type = other DNA
cttctccttccagcagccctggccgacgtgagtgca

SEQ ID NO: 4585 - DNA, 36 bp, Helotiales sp.
  source 1..36: mol_type = other DNA; note = DMI_Dod_QoI
cttgactttgccacatggctggccggggtagccaca

SEQ ID NO: 4586 - DNA, 30 bp, Rutstroemia sp.
  source 1..30: mol_type = other DNA; note = NJR-2017a WRK4
cttgcacggttgtccgggacggccgcacca

SEQ ID NO: 4587 - DNA, 30 bp, Sclerotinia sclerotiorum
  source 1..30: mol_type = other DNA
cttgcatggttgaccgggacgtccgcacca

SEQ ID NO: 4588 - DNA, 33 bp, Monilinia fructicola
  source 1..33: mol_type = other DNA
cttgcggcatccttgtccggggcgtccgcacca

SEQ ID NO: 4589 - DNA, 33 bp, Zymoseptoria tritici; identical to SEQ ID NO: 4447
  source 1..33: mol_type = other DNA

SEQ ID NO: 4590 - DNA, 33 bp, Zymoseptoria tritici; identical to SEQ ID NO: 4447
  source 1..33: mol_type = other DNA

SEQ ID NO: 4591 - DNA, 33 bp, Zymoseptoria tritici; identical to SEQ ID NO: 4447
  source 1..33: mol_type = other DNA

SEQ ID NO: 4592 - DNA, 33 bp, Zymoseptoria tritici; identical to SEQ ID NO: 4447
  source 1..33: mol_type = other DNA

SEQ ID NO: 4593 - DNA, 33 bp, Zymoseptoria tritici; identical to SEQ ID NO: 4447
  source 1..33: mol_type = other DNA

SEQ ID NO: 4594 - DNA, 33 bp, Zymoseptoria tritici; identical to SEQ ID NO: 4447
  source 1..33: mol_type = other DNA

SEQ ID NO: 4595 - DNA, 33 bp, Zymoseptoria tritici; identical to SEQ ID NO: 4459
  source 1..33: mol_type = other DNA

SEQ ID NO: 4596 - DNA, 33 bp, Zymoseptoria tritici; identical to SEQ ID NO: 4459
  source 1..33: mol_type = other DNA

SEQ ID NO: 4597 - DNA, 36 bp, Ophiocordyceps camponoti-floridani
  source 1..36: mol_type = other DNA
cttggggccacactgcgagttgggacggtagcacca

SEQ ID NO: 4598 - DNA, 36 bp, Lasiodiplodia theobromae
  source 1..36: mol_type = other DNA
cttgtgacagggctgaccgcggatgcggccacagaa

SEQ ID NO: 4599 - DNA, 36 bp, Lasiodiplodia theobromae; identical to SEQ ID NO: 4598
  source 1..36: mol_type = other DNA

SEQ ID NO: 4600 - DNA, 27 bp, Massarina eburnea
  source 1..27: mol_type = other DNA
gcagggctgaccaacaaagcggcattt

SEQ ID NO: 4601 - DNA, 39 bp, Pseudogymnoascus verrucosus
  source 1..39: mol_type = other DNA
gcgcttaactttgccacatggctggccagggcgccagca

SEQ ID NO: 4602 - DNA, 42 bp, Aspergillus fumigatiaffinis; identical to SEQ ID NO: 3425
  source 1..42: mol_type = other DNA

SEQ ID NO: 4603 - DNA, 42 bp, Aspergillus fumigatiaffinis; identical to SEQ ID NO: 3425
  source 1..42: mol_type = other DNA

SEQ ID NO: 4604 - DNA, 42 bp, Xylona heveae
  source 1..42: mol_type = other DNA
gcgcttagccttagagcagccctggccaggaaggtggcagaa

SEQ ID NO: 4605 - DNA, 36 bp, Colletotrichum siamense
  source 1..36: mol_type = other DNA
gcgcttccagcaaggctggccgggcttcgtgcacca

SEQ ID NO: 4606 - DNA, 36 bp, Colletotrichum siamense; identical to SEQ ID NO: 4605
  source 1..36: mol_type = other DNA

SEQ ID NO: 4607 - DNA, 36 bp, Colletotrichum viniferum
  source 1..36: mol_type = other DNA
gcgcttccagcaaggctggccgggcttggtgcacca

SEQ ID NO: 4608 - DNA, 36 bp, Cordyceps fumosorosea
  source 1..36: mol_type = other DNA
gcgcttccagcacggctgcgcggggcggaagcacca

SEQ ID NO: 4609 - DNA, 36 bp, Sporothrix schenckii
  source 1..36: mol_type = other DNA
gcgcttccagcaggactggcccttcagggggcaata

SEQ ID NO: 4610 - DNA, 42 bp, Coniochaeta pulveracea
  source 1..42: mol_type = other DNA
gcgcttcgacttccagcatggctgacctgggtgggggcacca

SEQ ID NO: 4611 - DNA, 42 bp, Drechmeria coniospora
  source 1..42: mol_type = other DNA
gcgcttcgccttccagcacccagacccgggacgagtgcacca

SEQ ID NO: 4612 - DNA, 42 bp, Stachybotrys chartarum
  source 1..42: mol_type = other DNA
gcgcttcgctttccagcacggctgcccgggacgagtgcacca

SEQ ID NO: 4613 - DNA, 42 bp, Stachybotrys chartarum; identical to SEQ ID NO: 4612
  source 1..42: mol_type = other DNA

SEQ ID NO: 4614 - DNA, 45 bp, Tothia fuscella
  source 1..45: mol_type = other DNA
gcgcttcgctttgccacatggctggccacgacgaaagcatctcca

SEQ ID NO: 4615 - DNA, 39 bp, Lachnellula occidentalis
  source 1..39: mol_type = other DNA
gcgcttctccttccagcagccctgtccacgagctccgca

SEQ ID NO: 4616 - DNA, 39 bp, Lachnellula willkommii
  source 1..39: mol_type = other DNA
gcgcttctccttccagcagccctgtccgcgagctccgca

SEQ ID NO: 4617 - DNA, 39 bp, Lachnellula subtilissima
  source 1..39: mol_type = other DNA
gcgcttctccttccagcagccttggccacgggcaccaca

SEQ ID NO: 4618 - DNA, 42 bp, Ophiostoma piceae
  source 1..42: mol_type = other DNA
gcgcttgaccttccagcagggctggccgaccatgggacacca

SEQ ID NO: 4619 - DNA, 39 bp, Pseudogymnoascus sp.
  source 1..39: mol_type = other DNA; note = 24MN13
gcgcttgaccttgccacatggctgcccagggcgccagca

SEQ ID NO: 4620 - DNA, 39 bp, Pseudogymnoascus sp.
  source 1..39: mol_type = other DNA; note = VKM F-4246
gcgcttgaccttgccacatggctggccaggaagccagca

SEQ ID NO: 4621 - DNA, 39 bp, Pseudogymnoascus sp.; identical to SEQ ID NO: 4620
  source 1..39: mol_type = other DNA; note = VKM F-4513 (FW-928)

SEQ ID NO: 4622 - DNA, 42 bp, Pseudogymnoascus sp.; identical to SEQ ID NO: 4159
  source 1..42: mol_type = other DNA; note = VKM F-4520 (FW-2644)

SEQ ID NO: 4623 - DNA, 42 bp, Cryomyces minteri
  source 1..42: mol_type = other DNA
gcgcttgaccttggagcagccttgaccagggagatggcagaa

SEQ ID NO: 4624 - DNA, 39 bp, Pseudogymnoascus sp.
  source 1..39: mol_type = other DNA; note = VKM F-4514 (FW-929)
gcgcttgacctttccgcagggctggccggggcgccagca

SEQ ID NO: 4625 - DNA, 42 bp, Pseudogymnoascus sp.
  source 1..42: mol_type = other DNA; note = VKM F-4517 (FW-2822)
gcgcttgactttgccacatggctgaccagggcgccagcagta

SEQ ID NO: 4626 - DNA, 42 bp, Pseudogymnoascus sp.
  source 1..42: mol_type = other DNA; note = 23342-1-I1
gcgcttgactttgccacatggctggccggggcgccagcagaa

SEQ ID NO: 4627 - DNA, 39 bp, Marssonina coronariae
  source 1..39: mol_type = other DNA
gcgcttgactttgccgcaaggttgtccaggctttccgca

SEQ ID NO: 4628 - DNA, 39 bp, Cordyceps fumosorosea
  source 1..39: mol_type = other DNA
gcgcttgagcttccagcagggctgggcggggcggaagca

SEQ ID NO: 4629 - DNA, 42 bp, Neofusicoccum parvum
  source 1..42: mol_type = other DNA
gcgcttgagtttcgagcagggctgacccttccagcgacacca

SEQ ID NO: 4630 - DNA, 39 bp, Lachnellula willkommii; identical to SEQ ID NO: 3860
  source 1..39: mol_type = other DNA

SEQ ID NO: 4631 - DNA, 33 bp, Rutstroemia sp.
  source 1..33: mol_type = other DNA; note = NJR-2017a WRK4
gcgcttgcagggctggcctggacgaccgcacca

SEQ ID NO: 4632 - DNA, 42 bp, Trichoderma atroviride
  source 1..42: mol_type = other DNA; strain = IMI 206040
gcgcttggccttccaacaagactcgccgacgcgccagcacca

SEQ ID NO: 4633 - DNA, 42 bp, Trichoderma gamsii; identical to SEQ ID NO: 4632
  source 1..42: mol_type = other DNA

SEQ ID NO: 4634 - DNA, 42 bp, Trichoderma citrinoviride
  source 1..42: mol_type = other DNA
gcgcttggccttccagcagggctcgccgatgcggtagcacca

SEQ ID NO: 4635 - DNA, 42 bp, Trichoderma parareesei; identical to SEQ ID NO: 4634
  source 1..42: mol_type = other DNA

SEQ ID NO: 4636 - DNA, 42 bp, Trichoderma reesei; identical to SEQ ID NO: 4634
  source 1..42: mol_type = other DNA; strain = QM6a

SEQ ID NO: 4637 - DNA, 42 bp, Cordyceps fumosorosea
  source 1..42: mol_type = other DNA
gcgcttggccttccagcagggctgcgcggggcggaagcacca

SEQ ID NO: 4638 - DNA, 42 bp, Neofusicoccum parvum
  source 1..42: mol_type = other DNA
gcgcttggccttcgaacacggctgacccttccaccggcacca

SEQ ID NO: 4639 - DNA, 42 bp, Lasallia pustulata; identical to SEQ ID NO: 3882
  source 1..42: mol_type = other DNA

SEQ ID NO: 4640 - DNA, 42 bp, Delitschia confertaspora
  source 1..42: mol_type = other DNA
gcgcttggccttggagcaggactggccgggaaagcggcaatt

SEQ ID NO: 4641 - DNA, 42 bp, Saccharata proteae
  source 1..42: mol_type = other DNA
gcgcttggccttggagcagggctggccgggcaagtggcagaa

SEQ ID NO: 4642 - DNA, 42 bp, Zymoseptoria tritici
  source 1..42: mol_type = other DNA
gcgcttggctttggcacaaggggcgccgatggcaccgcacca

SEQ ID NO: 4643 - DNA, 42 bp, Zymoseptoria tritici; identical to SEQ ID NO: 4642
  source 1..42: mol_type = other DNA

SEQ ID NO: 4644 - DNA, 42 bp, Zymoseptoria tritici; identical to SEQ ID NO: 4642
  source 1..42: mol_type = other DNA

SEQ ID NO: 4645 - DNA, 42 bp, Zymoseptoria tritici; identical to SEQ ID NO: 4642
  source 1..42: mol_type = other DNA

SEQ ID NO: 4646 - DNA, 42 bp, Pseudogymnoascus sp.
  source 1..42: mol_type = other DNA; note = VKM F-4520 (FW-2644)
gcgcttggcttttccgcagggctgtccgggacgccagcagaa

SEQ ID NO: 4647 - DNA, 42 bp, Saccharata proteae
  source 1..42: mol_type = other DNA
gcgcttggtcttggagcaaggctggccggggagatggcagaa

SEQ ID NO: 4648 - DNA, 42 bp, Sporothrix brasiliensis
  source 1..42: mol_type = other DNA
gcgcttgtacttccagcacgactggcctttgagggggcagta

SEQ ID NO: 4649 - DNA, 39 bp, Lophium mytilinum
  source 1..39: mol_type = other DNA
gcgcttgtccttgctgcaagactggcccggaagatggca

SEQ ID NO: 4650 - DNA, 45 bp, Lophium mytilinum
  source 1..45: mol_type = other DNA
gcgcttgtccttgctgcaagactggcctggaagatggcaacccca

SEQ ID NO: 4651 - DNA, 42 bp, Amniculicola lignicola
  source 1..42: mol_type = other DNA
gcgcttgttcttgccgcagggttggcccgggaagcggcacca

SEQ ID NO: 4652 - DNA, 42 bp, Metarhizium rileyi
  source 1..42: mol_type = other DNA
gcgctttgccttccagcaaggctgtcccggtcgccaacacca

SEQ ID NO: 4653 - DNA, 42 bp, Metarhizium rileyi; identical to SEQ ID NO: 4652
  source 1..42: mol_type = other DNA

SEQ ID NO: 4654 - DNA, 42 bp, Cenococcum geophilum
  source 1..42: mol_type = other DNA
ggctgccatctcccgggccagtcctgcgggaaggccaagcgc

SEQ ID NO: 4655 - DNA, 33 bp, Lachnellula suecica
  source 1..33: mol_type = other DNA
ggctgtggtgcccgaggccaaggttgctacaag

SEQ ID NO: 4656 - DNA, 33 bp, Ophiocordyceps camponoti-rufipedis
  source 1..33: mol_type = other DNA
ggttgggcagttggagaggggacgagtgcacca

SEQ ID NO: 4657 - DNA, 36 bp, Massarina eburnea
  source 1..36: mol_type = other DNA
gtcacgtttgcaaggctggccgacgaagcggcaggt

SEQ ID NO: 4658 - DNA, 36 bp, Massarina eburnea
  source 1..36: mol_type = other DNA
gtcacgtttgcaaggctggccgacgaagcggcattt

SEQ ID NO: 4659 - DNA, 39 bp, Botryosphaeria dothidea
  source 1..39: mol_type = other DNA
tactgccacttccgcggctcggcttgtcccaagaagcgt

SEQ ID NO: 4660 - DNA, 39 bp, Botryosphaeria dothidea; identical to SEQ ID NO: 4659
  source 1..39: mol_type = other DNA

SEQ ID NO: 4661 - DNA, 42 bp, Mytilinidion resinicola
  source 1..42: mol_type = other DNA
tactgccatctccccggccaatcttgcagcaaagataaacgc

SEQ ID NO: 4662 - DNA, 42 bp, Pseudogymnoascus sp.
  source 1..42: mol_type = other DNA; note = VKM F-4515 (FW-2607)
tactgctggcgccctggtcagccatgtggcaaagtcaagcgc

SEQ ID NO: 4663 - DNA, 42 bp, Pseudogymnoascus sp.
  source 1..42: mol_type = other DNA; note = VKM F-4515 (FW-2607)
tactgctggcgtccaggccagccctgcgggaaggccaaacgc

SEQ ID NO: 4664 - DNA, 18 bp, Botryosphaeria dothidea
  source 1..18: mol_type = other DNA
tattgcaggttccggggc

SEQ ID NO: 4665 - DNA, 36 bp, Sporothrix schenckii
  source 1..36: mol_type = other DNA; strain = 1099-18
tattgccccctgaagggccagtcctgctggaagcgc

SEQ ID NO: 4666 - DNA, 39 bp, Lachnellula occidentalis
  source 1..39: mol_type = other DNA
tcgcttgaccttccagcagccctgtcctcgtgctccgca

SEQ ID NO: 4667 - DNA, 18 bp, Lachnellula subtilissima
  source 1..18: mol_type = other DNA
tcgcttgatcttccagca

SEQ ID NO: 4668 - DNA, 39 bp, Lachnellula hyalina; identical to SEQ ID NO: 3868
  source 1..39: mol_type = other DNA

SEQ ID NO: 4669 - DNA, 42 bp, Trichoderma guizhouense
  source 1..42: mol_type = other DNA
tcgcttggggatccagcaaccctctccgacgcggtagcacca

SEQ ID NO: 4670 - DNA, 42 bp, Trichoderma harzianum
  source 1..42: mol_type = other DNA
tcgcttggggatccagcaaggcattccaatgcggtagcacca

SEQ ID NO: 4671 - DNA, 36 bp, Ustilaginoidea virens
  source 1..36: mol_type = other DNA
tctcttccagcatggctctccgggccggtcgcacca

SEQ ID NO: 4672 - DNA, 42 bp, Aspergillus lentulus; identical to SEQ ID NO: 3424
  source 1..42: mol_type = other DNA

SEQ ID NO: 4673 - DNA, 42 bp, Aspergillus lentulus; identical to SEQ ID NO: 3424
  source 1..42: mol_type = other DNA

SEQ ID NO: 4674 - DNA, 42 bp, Aspergillus lentulus; identical to SEQ ID NO: 3424
  source 1..42: mol_type = other DNA

SEQ ID NO: 4675 - DNA, 42 bp, Aspergillus lentulus; identical to SEQ ID NO: 3424
  source 1..42: mol_type = other DNA

SEQ ID NO: 4676 - DNA, 39 bp, Lachnellula hyalina
  source 1..39: mol_type = other DNA
tctcttctccttccagcatccttggcctcgggcaccgca

SEQ ID NO: 4677 - DNA, 42 bp, Metarhizium rileyi
  source 1..42: mol_type = other DNA
tctcttgaccttccagcaaggctgaccagggcgccagcacca

SEQ ID NO: 4678 - DNA, 42 bp, Metarhizium rileyi; identical to SEQ ID NO: 4677
  source 1..42: mol_type = other DNA

SEQ ID NO: 4679 - DNA, 42 bp, Ustilaginoidea virens
  source 1..42: mol_type = other DNA
tctcttgaccttccagcatggctcccctgggcggtcgcacca

SEQ ID NO: 4680 - DNA, 30 bp, Coleophoma cylindrospora
  source 1..30: mol_type = other DNA
tctcttgcacggttgacccatacgtccgca

SEQ ID NO: 4681 - DNA, 39 bp, Botrytis fragariae
  source 1..39: mol_type = other DNA
tgcaatatccgatcatatacttgcttcgagtctcgcaga

SEQ ID NO: 4682 - DNA, 30 bp, Sodiomyces alkalinus
  source 1..30: mol_type = other DNA
tgcaccaagcccggccagccctgctggaag

SEQ ID NO: 4683 - DNA, 39 bp, Sodiomyces alkalinus
  source 1..39: mol_type = other DNA
tgcaccaagcccggccagccctgctggaagaacaagcgt

SEQ ID NO: 4684 - DNA, 33 bp, Dothistroma septosporum
  source 1..33: mol_type = other DNA
tgcaccgtacccggcctcgcctgcggcaagcgc

SEQ ID NO: 4685 - DNA, 39 bp, Mytilinidion resinicola
  source 1..39: mol_type = other DNA
tgccatctccccggccaatcctgcagcaaagacaagcgc

SEQ ID NO: 4686 - DNA, 39 bp, Glonium stellatum
  source 1..39: mol_type = other DNA
tgccatctcccgggtcaatcctgccccaaggacaagcgc

SEQ ID NO: 4687 - DNA, 39 bp, Verticillium longisporum
  source 1..39: mol_type = other DNA
tgcccccgacctggacagggctgctggaagaacaagcgc

SEQ ID NO: 4688 - DNA, 39 bp, Verticillium dahliae; identical to SEQ ID NO: 4412
  source 1..39: mol_type = other DNA

SEQ ID NO: 4689 - DNA, 39 bp, Verticillium dahliae; identical to SEQ ID NO: 4412
  source 1..39: mol_type = other DNA

SEQ ID NO: 4690 - DNA, 39 bp, Verticillium dahliae; identical to SEQ ID NO: 4412
  source 1..39: mol_type = other DNA

SEQ ID NO: 4691 - DNA, 39 bp, Verticillium dahliae; identical to SEQ ID NO: 4412
  source 1..39: mol_type = other DNA

SEQ ID NO: 4692 - DNA, 39 bp, Verticillium dahliae; identical to SEQ ID NO: 4412
  source 1..39: mol_type = other DNA

SEQ ID NO: 4693 - DNA, 27 bp, Aaosphaeria arxii
  source 1..27: mol_type = other DNA
tgccgctggcccggtcagccctgctct

SEQ ID NO: 4694 - DNA, 27 bp, Aaosphaeria arxii
  source 1..27: mol_type = other DNA
tgccgctggcccggtcagccctgctct

SEQ ID NO: 4695 - DNA, 27 bp, Aaosphaeria arxii
  source 1..27: mol_type = other DNA
tgccgctggcccggtcagccctgctct

SEQ ID NO: 4696 - DNA, 36 bp, Melanomma pulvis-pyrius
  source 1..36: mol_type = other DNA
tgccgcttcccaggccagccctgctctaagaagcgc

SEQ ID NO: 4697 - DNA, 36 bp, Polyplosphaeria fusca
  source 1..36: mol_type = other DNA
tgccgcttcccaggctcattctgtgggaagaagagg

SEQ ID NO: 4698 - DNA, 27 bp, Lophiotrema nucula
  source 1..27: mol_type = other DNA
tgccgcttccccggtcagccctgctct

SEQ ID NO: 4699 - DNA, 27 bp, Lophiotrema nucula
  source 1..27: mol_type = other DNA
tgccgcttccccggtcagccctgctct

SEQ ID NO: 4700 - DNA, 30 bp, Melanomma pulvis-pyrius
  source 1..30: mol_type = other DNA
tgccgcttcccgggccagccatgctccaag

SEQ ID NO: 4701 - DNA, 30 bp, Melanomma pulvis-pyrius; identical to SEQ ID NO: 4700
  source 1..30: mol_type = other DNA

SEQ ID NO: 4702 - DNA, 33 bp, Melanomma pulvis-pyrius
  source 1..33: mol_type = other DNA
tgccgcttcccgggccagccatgctccaagcgt

SEQ ID NO: 4703 - DNA, 39 bp, Diplocarpon rosae
  source 1..39: mol_type = other DNA
tgcggacacccaggacagccatgtggcaaggctaagcgt

SEQ ID NO: 4704 - DNA, 39 bp, Diplocarpon rosae
  source 1..39: mol_type = other DNA
tgcggacacccaggccagccctgtggtaaggcaaaacgc

SEQ ID NO: 4705 - DNA, 30 bp, Cadophora sp.
  source 1..30: mol_type = other DNA; note = DSE1049
tgcggacacccaggtcaaccttgcggaaaa

SEQ ID NO: 4706 - DNA, 33 bp, Cadophora sp.
  source 1..33: mol_type = other DNA; note = DSE1049
tgcggacacccaggtcaaccttgcggaaaacgt

SEQ ID NO: 4707 - DNA, 39 bp, Amorphotheca resinae
  source 1..39: mol_type = other DNA
tgcggcaaagttggacagccatgcggaaaggcaaagcgt

SEQ ID NO: 4708 - DNA, 39 bp, Drepanopeziza brunnea
  source 1..39: mol_type = other DNA
tgcggctaccgcggacagccatgccccaaggccaagcgt

SEQ ID NO: 4709 - DNA, 39 bp, Verticillium longisporum
  source 1..39: mol_type = other DNA
tgctcccgacctggacagggttgctggaaggccaagcgt

SEQ ID NO: 4710 - DNA, 21 bp, Ophiocordyceps camponoti-floridani
  source 1..21: mol_type = other DNA
tgctcgaggcgtggagaggcg

SEQ ID NO: 4711 - DNA, 39 bp, Pseudogymnoascus sp.
  source 1..39: mol_type = other DNA; note = VKM F-3557
tgctggcgccccggccagccctgtggcaaggtcaagcgc

SEQ ID NO: 4712 - DNA, 39 bp, Pseudogymnoascus sp.; identical to SEQ ID NO: 4711
  source 1..39: mol_type = other DNA; note = VKM F-4516 (FW-969)

SEQ ID NO: 4713 - DNA, 39 bp, Pseudogymnoascus sp.
  source 1..39: mol_type = other DNA; note = VKM F-103
tgctggcgccctggccagccatgtggcaaagttaagcgc

SEQ ID NO: 4714 - DNA, 39 bp, Pseudogymnoascus sp.; identical to SEQ ID NO: 4195
  source 1..39: mol_type = other DNA; note = 03VT05

SEQ ID NO: 4715 - DNA, 39 bp, Pseudogymnoascus sp.; identical to SEQ ID NO: 4195
  source 1..39: mol_type = other DNA; note = VKM F-4519 (FW-2642)

SEQ ID NO: 4716 - DNA, 39 bp, Pseudogymnoascus sp.
  source 1..39: mol_type = other DNA; note = 05NY08
tgctggcgccctggccagccatgtggcaaggttaagcgc

SEQ ID NO: 4717 - DNA, 39 bp, Pseudogymnoascus sp.
  source 1..39: mol_type = other DNA; note = VKM F-3557
tgctggcgtccaggccagccatgcggaaaagccaagcgc

SEQ ID NO: 4718 - DNA, 39 bp, Pseudogymnoascus sp.; identical to SEQ ID NO: 4717
  source 1..39: mol_type = other DNA; note = VKM F-4516 (FW-969)

SEQ ID NO: 4719 - DNA, 39 bp, Pseudogymnoascus sp.
  source 1..39: mol_type = other DNA; note = VKM F-4516 (FW-969)
tgctggcgtccaggccagccgtgcggaaaagccaagcgc

SEQ ID NO: 4720 - DNA, 39 bp, Pseudogymnoascus sp.
  source 1..39: mol_type = other DNA; note = VKM F-103
tgctggcgtccaggccagccgtgcggcaaagccaagcgc

SEQ ID NO: 4721 - DNA, 39 bp, Pseudogymnoascus sp.
  source 1..39: mol_type = other DNA; note = WSF 3629
tgctggcgtccaggtcagccatgcggcaaggtcaagcgt

SEQ ID NO: 4722 - DNA, 39 bp, Pseudogymnoascus sp.
  source 1..39: mol_type = other DNA; note = WSF 3629
tgctggcgtcctggccagccatgtggcaaagctaagcgt

SEQ ID NO: 4723 - DNA, 39 bp, Pseudogymnoascus sp.
  source 1..39: mol_type = other DNA; note = 03VT05
tgctggcgtcctggccagccatgtggtaaagctaagcgt

SEQ ID NO: 4724 - DNA, 39 bp, Pseudogymnoascus sp.
  source 1..39: mol_type = other DNA; note = 05NY08
tgctggcgtcctggtcagccatgcggaaaagctaagcgt

SEQ ID NO: 4725 - DNA, 39 bp, Westerdykella ornata
  source 1..39: mol_type = other DNA
tgctggttccgtggccagccctgctccaaggccaagcgc

SEQ ID NO: 4726 - DNA, 27 bp, Westerdykella ornata
  source 1..27: mol_type = other DNA
tgctggttccgtgggcagccctgcaag

SEQ ID NO: 4727 - DNA, 39 bp, Westerdykella ornata
  source 1..39: mol_type = other DNA
tgctggttccgtgggcagccctgcaagaaggtcaagcgc

SEQ ID NO: 4728 - DNA, 63 bp, Aplosporella prunicola; identical to SEQ ID NO: 3379
  source 1..63: mol_type = other DNA

SEQ ID NO: 4729 - DNA, 42 bp, Zasmidium cellare
  source 1..42: mol_type = other DNA
tggaagtgtggtgtcccaggccaagcttgcaacaagaagcga

SEQ ID NO: 4730 - DNA, 51 bp, Aplosporella prunicola
  source 1..51: mol_type = other DNA
tggccgcgcttctgcttccgccccggccagccctgcaccaaggccaagcgg

SEQ ID NO: 4731 - DNA, 45 bp, Mytilinidion resinicola
  source 1..45: mol_type = other DNA
tggggctgccatcttccgggacagtcttgtagcaaggacaagcgc

SEQ ID NO: 4732 - DNA, 42 bp, Coniochaeta ligniaria
  source 1..42: mol_type = other DNA
tggtgcaacatccgcggcgagccgtgctggaagtccaagcgt

SEQ ID NO: 4733 - DNA, 33 bp, Purpureocillium lilacinum
  source 1..33: mol_type = other DNA
tggtgcaaccgccccggccagccctgcaagcga

SEQ ID NO: 4734 - DNA, 33 bp, Purpureocillium lilacinum; identical to SEQ ID NO: 4733
  source 1..33: mol_type = other DNA

SEQ ID NO: 4735 - DNA, 33 bp, Purpureocillium lilacinum; identical to SEQ ID NO: 4733
  source 1..33: mol_type = other DNA

SEQ ID NO: 4736 - DNA, 33 bp, Escovopsis weberi; identical to SEQ ID NO: 3831
  source 1..33: mol_type = other DNA

SEQ ID NO: 4737 - DNA, 36 bp, Escovopsis weberi
  source 1..36: mol_type = other DNA
tggtgcaccaacccgggccagggctgctggaagcgc

SEQ ID NO: 4738 - DNA, 33 bp, Phaeoacremonium minimum; identical to SEQ ID NO: 4100
  source 1..33: mol_type = other DNA

SEQ ID NO: 4739 - DNA, 33 bp, Phaeoacremonium minimum
  source 1..33: mol_type = other DNA
tggtgcaccaagcatggccagtcgtgctggaag

SEQ ID NO: 4740 - DNA, 39 bp, Phaeoacremonium minimum
  source 1..39: mol_type = other DNA
tggtgcaccaagcatggccagtcgtgctggaagaagcga

SEQ ID NO: 4741 - DNA, 36 bp, Colletotrichum aenigma
  source 1..36: mol_type = other DNA
tggtgcaccaagcccggccaaccgtgctggaagcgc

SEQ ID NO: 4742 - DNA, 36 bp, Colletotrichum aenigma; identical to SEQ ID NO: 4741
  source 1..36: mol_type = other DNA

SEQ ID NO: 4743 - DNA, 39 bp, Chaetomium thermophilum
  source 1..39: mol_type = other DNA
tggtgcacccgcttcccgggccagccctgctggaagcgc

SEQ ID NO: 4744 - DNA, 33 bp, Madurella mycetomatis; identical to SEQ ID NO: 3923
  source 1..33: mol_type = other DNA

SEQ ID NO: 4745 - DNA, 36 bp, Madurella mycetomatis; identical to SEQ ID NO: 3924
  source 1..36: mol_type = other DNA

SEQ ID NO: 4746 - DNA, 39 bp, Madurella mycetomatis
  source 1..39: mol_type = other DNA
tggtgcaccggtttccccggccagccctgctggaagcgt

SEQ ID NO: 4747 - DNA, 36 bp, Thermothielavioides terrestris
  source 1..36: mol_type = other DNA
tggtgcaccttcttcctgggccagccgtgctggaag

SEQ ID NO: 4748 - DNA, 39 bp, Thermothielavioides terrestris
  source 1..39: mol_type = other DNA
tggtgcaccttcttcctgggccagccgtgctggaagcgg

SEQ ID NO: 4749 - DNA, 36 bp, Colletotrichum asianum
  source 1..36: mol_type = other DNA
tggtgcacgaagcccggccagccttgctggaagcgc

SEQ ID NO: 4750 - DNA, 36 bp, Colletotrichum fructicola; identical to SEQ ID NO: 4749
  source 1..36: mol_type = other DNA

SEQ ID NO: 4751 - DNA, 36 bp, Colletotrichum fructicola; identical to SEQ ID NO: 4749
  source 1..36: mol_type = other DNA

SEQ ID NO: 4752 - DNA, 36 bp, Colletotrichum fructicola; identical to SEQ ID NO: 4749
  source 1..36: mol_type = other DNA

SEQ ID NO: 4753 - DNA, 36 bp, Colletotrichum fructicola; identical to SEQ ID NO: 4749
  source 1..36: mol_type = other DNA

SEQ ID NO: 4754 - DNA, 36 bp, Colletotrichum siamense; identical to SEQ ID NO: 4749
  source 1..36: mol_type = other DNA

SEQ ID NO: 4755 - DNA, 30 bp, Stachybotrys chartarum; identical to SEQ ID NO: 631
  source 1..30: mol_type = other DNA

SEQ ID NO: 4756 - DNA, 30 bp, Stachybotrys chartarum; identical to SEQ ID NO: 631
  source 1..30: mol_type = other DNA

SEQ ID NO: 4757 - DNA, 33 bp, Phaeoacremonium minimum
  source 1..33: mol_type = other DNA
tggtgcactaagcacggccagtcatgctggaag

SEQ ID NO: 4758 - DNA, 33 bp, Drechmeria coniospora
  source 1..33: mol_type = other DNA
tggtgcactcgccccggaagtggttgctggaag

SEQ ID NO: 4759 - DNA, 42 bp, Drechmeria coniospora
  source 1..42: mol_type = other DNA
tggtgcactcgccccggaagtggttgctggaaggtcaagaga

SEQ ID NO: 4760 - DNA, 33 bp, Purpureocillium lilacinum
  source 1..33: mol_type = other DNA
tggtgcactcgccgcggccagccttgcaagcgc

SEQ ID NO: 4761 - DNA, 33 bp, Purpureocillium lilacinum; identical to SEQ ID NO: 4760
  source 1..33: mol_type = other DNA

SEQ ID NO: 4762 - DNA, 33 bp, Purpureocillium lilacinum; identical to SEQ ID NO: 4760
  source 1..33: mol_type = other DNA

SEQ ID NO: 4763 - DNA, 42 bp, Drechmeria coniospora
  source 1..42: mol_type = other DNA
tggtgcactcgtcccgggtctgggtgctggaaggcgaagcgc

SEQ ID NO: 4764 - DNA, 45 bp, Madurella mycetomatis
  source 1..45: mol_type = other DNA
tggtgcactggcttccccggccagccttgctggaaggagaagcgt

SEQ ID NO: 4765 - DNA, 33 bp, Beauveria bassiana
  source 1..33: mol_type = other DNA
tggtgcatgagacccggtcagccatgctggaag

SEQ ID NO: 4766 - DNA, 33 bp, Beauveria bassiana; identical to SEQ ID NO: 4765
  source 1..33: mol_type = other DNA

SEQ ID NO: 4767 - DNA, 33 bp, Beauveria bassiana; identical to SEQ ID NO: 4765
  source 1..33: mol_type = other DNA

SEQ ID NO: 4768 - DNA, 33 bp, Beauveria bassiana; identical to SEQ ID NO: 4765
  source 1..33: mol_type = other DNA

SEQ ID NO: 4769 - DNA, 33 bp, Beauveria bassiana
  source 1..33: mol_type = other DNA
tggtgcatgagacccggtcagccgtgctggaag

SEQ ID NO: 4770 - DNA, 33 bp, Beauveria bassiana; identical to SEQ ID NO: 4769
  source 1..33: mol_type = other DNA

SEQ ID NO: 4771 - DNA, 33 bp, Beauveria bassiana; identical to SEQ ID NO: 4769
  source 1..33: mol_type = other DNA

SEQ ID NO: 4772 - DNA, 33 bp, Beauveria bassiana; identical to SEQ ID NO: 4769
  source 1..33: mol_type = other DNA

SEQ ID NO: 4773 - DNA, 33 bp, Beauveria bassiana; identical to SEQ ID NO: 4769
  source 1..33: mol_type = other DNA

SEQ ID NO: 4774 - DNA, 33 bp, Beauveria bassiana; identical to SEQ ID NO: 4769
  source 1..33: mol_type = other DNA

SEQ ID NO: 4775 - DNA, 33 bp, Beauveria bassiana; identical to SEQ ID NO: 4769
  source 1..33: mol_type = other DNA

SEQ ID NO: 4776 - DNA, 33 bp, Beauveria bassiana; identical to SEQ ID NO: 4769
  source 1..33: mol_type = other DNA

SEQ ID NO: 4777 - DNA, 42 bp, Aspergillus fumigatiaffinis; identical to SEQ ID NO: 3440
  source 1..42: mol_type = other DNA

SEQ ID NO: 4778 - DNA, 42 bp, Aspergillus fumigatiaffinis; identical to SEQ ID NO: 3440
  source 1..42: mol_type = other DNA

SEQ ID NO: 4779 - DNA, 33 bp, Pyricularia oryzae
  source 1..33: mol_type = other DNA
tggtgcccccggcgcggccagccctgctggaag

SEQ ID NO: 4780 - DNA, 33 bp, Pyricularia oryzae; identical to SEQ ID NO: 4779
  source 1..33: mol_type = other DNA

SEQ ID NO: 4781 - DNA, 33 bp, Pyricularia oryzae; identical to SEQ ID NO: 4779
  source 1..33: mol_type = other DNA

SEQ ID NO: 4782 - DNA, 42 bp, Pyricularia oryzae
  source 1..42: mol_type = other DNA
tggtgcccccggcgcggccagccctgctggaaggtcaagcgc

SEQ ID NO: 4783 - DNA, 42 bp, Pyricularia oryzae; identical to SEQ ID NO: 4782
  source 1..42: mol_type = other DNA

SEQ ID NO: 4784 - DNA, 42 bp, Pyricularia oryzae; identical to SEQ ID NO: 4782
  source 1..42: mol_type = other DNA

SEQ ID NO: 4785 - DNA, 33 bp, Phialemoniopsis curvata
  source 1..33: mol_type = other DNA
tggtgcccgatccgcggccagccctgctggaag

SEQ ID NO: 4786 - DNA, 42 bp, Phialemoniopsis curvata
  source 1..42: mol_type = other DNA
tggtgcccgatccgcggccagccctgctggaaggtcaagcgg

SEQ ID NO: 4787 - DNA, 42 bp, Phialemoniopsis curvata
  source 1..42: mol_type = other DNA
tggtgcccgatccggggccagccgtgctggaaggccaagagg

SEQ ID NO: 4788 - DNA, 33 bp, Pyricularia pennisetigena
  source 1..33: mol_type = other DNA
tggtgcccgcgccgcggccaaccctgctggaag

SEQ ID NO: 4789 - DNA, 36 bp, Pyricularia pennisetigena
  source 1..36: mol_type = other DNA
tggtgcccgcgccgcggccaaccctgctggaagcgc

SEQ ID NO: 4790 - DNA, 33 bp, Neurospora tetrasperma; identical to SEQ ID NO: 4047
  source 1..33: mol_type = other DNA

SEQ ID NO: 4791 - DNA, 39 bp, Neurospora tetrasperma
  source 1..39: mol_type = other DNA
tggtgccgcatccacggccagtcctgctggaagaagcgt

SEQ ID NO: 4792 - DNA, 42 bp, Neurospora tetrasperma
  source 1..42: mol_type = other DNA
tggtgccgcatccacggccagtcctgctggaaggccaagcgc

SEQ ID NO: 4793 - DNA, 36 bp, Neurospora tetrasperma
  source 1..36: mol_type = other DNA
tggtgccgcatccacggccagtcgtgctggaagcgt

SEQ ID NO: 4794 - DNA, 33 bp, Neurospora tetrasperma
  source 1..33: mol_type = other DNA
tggtgccggatccacggccagtcctgctggaag

SEQ ID NO: 4795 - DNA, 39 bp, Neurospora tetrasperma
  source 1..39: mol_type = other DNA
tggtgccggatccacggccagtcctgctggaagaagcgt

SEQ ID NO: 4796 - DNA, 36 bp, Neurospora tetrasperma
  source 1..36: mol_type = other DNA
tggtgccggatccacggccagtcgtgctggaagcgt

SEQ ID NO: 4797 - DNA, 33 bp, Sordaria macrospora
  source 1..33: mol_type = other DNA
tggtgccggatccatggccagtcctgctggaag

SEQ ID NO: 4798 - DNA, 33 bp, Sordaria macrospora; identical to SEQ ID NO: 4797
  source 1..33: mol_type = other DNA

SEQ ID NO: 4799 - DNA, 42 bp, Sordaria macrospora
  source 1..42: mol_type = other DNA
tggtgccggatccatggccagtcctgctggaaggccaagcgc

SEQ ID NO: 4800 - DNA, 42 bp, Sordaria macrospora; identical to SEQ ID NO: 4799
  source 1..42: mol_type = other DNA

SEQ ID NO: 4801 - DNA, 33 bp, Sordaria macrospora
  source 1..33: mol_type = other DNA
tggtgccggatccatggccagtcgtgctggaag

SEQ ID NO: 4802 - DNA, 33 bp, Sordaria macrospora; identical to SEQ ID NO: 4801
  source 1..33: mol_type = other DNA

SEQ ID NO: 4803 - DNA, 36 bp, Sordaria macrospora
  source 1..36: mol_type = other DNA
tggtgccggatccatggccagtcttgctggaagaag

SEQ ID NO: 4804 - DNA, 36 bp, Sordaria macrospora; identical to SEQ ID NO: 4803
  source 1..36: mol_type = other DNA

SEQ ID NO: 4805 - DNA, 39 bp, Sordaria macrospora
  source 1..39: mol_type = other DNA
tggtgccggatccatggccagtcttgctggaagaagaga

SEQ ID NO: 4806 - DNA, 39 bp, Sordaria macrospora; identical to SEQ ID NO: 4805
  source 1..39: mol_type = other DNA

SEQ ID NO: 4807 - DNA, 36 bp, Cytospora leucostoma
  source 1..36: mol_type = other DNA
tggtgcctcctcaagggccaggggtgctggaagcgg

SEQ ID NO: 4808 - DNA, 33 bp, Coniella lustricola; identical to SEQ ID NO: 3757
  source 1..33: mol_type = other DNA

SEQ ID NO: 4809 - DNA, 36 bp, Coniella lustricola
  source 1..36: mol_type = other DNA
tggtgcctcttccacggtgagggctgctggaagcgc

SEQ ID NO: 4810 - DNA, 33 bp, Valsa sordida
  source 1..33: mol_type = other DNA
tggtgcctgctcaagggccaaggctgctggaag

SEQ ID NO: 4811 - DNA, 36 bp, Valsa sordida; identical to SEQ ID NO: 4382
  source 1..36: mol_type = other DNA

SEQ ID NO: 4812 - DNA, 36 bp, Valsa sordida
  source 1..36: mol_type = other DNA
tggtgcctgctcaagggccagggatgctggaagcgc

SEQ ID NO: 4813 - DNA, 33 bp, Valsa mali
  source 1..33: mol_type = other DNA
tggtgcctgttcaagggcgagggatgctggaag

SEQ ID NO: 4814 - DNA, 36 bp, Valsa mali
  source 1..36: mol_type = other DNA
tggtgcctgttcaagggcgagggatgctggaagcgc

SEQ ID NO: 4815 - DNA, 33 bp, Coniella lustricola
  source 1..33: mol_type = other DNA
tggtgcctgttccacggcgagggctgctggaag

SEQ ID NO: 4816 - DNA, 33 bp, Ustilaginoidea virens
  source 1..33: mol_type = other DNA
tggtgcgaccggcccggagagccatgctggaag

SEQ ID NO: 4817 - DNA, 36 bp, Ustilaginoidea virens
  source 1..36: mol_type = other DNA
tggtgcgaccggcccggagagccatgctggaagaga

SEQ ID NO: 4818 - DNA, 33 bp, Botrytis elliptica
  source 1..33: mol_type = other DNA
tggtgcggacgcccaggacaaccatgcaagcga

SEQ ID NO: 4819 - DNA, 33 bp, Rutstroemia sp.
  source 1..33: mol_type = other DNA; note = NJR-2017a BBW
tggtgcggacgcccaggccaaccctgcaaacgt

SEQ ID NO: 4820 - DNA, 27 bp, Botrytis hyacinthi
  source 1..27: mol_type = other DNA
tggtgcggacgccccggacaaccatgc

SEQ ID NO: 4821 - DNA, 30 bp, Botryotinia convoluta; identical to SEQ ID NO: 4258
  source 1..30: mol_type = other DNA

SEQ ID NO: 4822 - DNA, 30 bp, Botrytis hyacinthi; identical to SEQ ID NO: 4258
  source 1..30: mol_type = other DNA

SEQ ID NO: 4823 - DNA, 39 bp, Botryotinia convoluta
  source 1..39: mol_type = other DNA
tggtgcggacgccccggacaaccatgcaaggagaagcgt

SEQ ID NO: 4824 - DNA, 39 bp, Botrytis hyacinthi; identical to SEQ ID NO: 4823
  source 1..39: mol_type = other DNA

SEQ ID NO: 4825 - DNA, 30 bp, Sclerotinia sclerotiorum; identical to SEQ ID NO: 385
  source 1..30: mol_type = other DNA

SEQ ID NO: 4826 - DNA, 33 bp, Sclerotinia sclerotiorum
  source 1..33: mol_type = other DNA
tggtgcggacgccccggacaaccctgcaaacgt

SEQ ID NO: 4827 - DNA, 33 bp, Monilinia laxa
  source 1..33: mol_type = other DNA
tggtgcggacgccccggacaaggatgcaagcgt

SEQ ID NO: 4828 - DNA, 30 bp, Botryotinia calthae; identical to SEQ ID NO: 939
  source 1..30: mol_type = other DNA

SEQ ID NO: 4829 - DNA, 30 bp, Botryotinia calthae; identical to SEQ ID NO: 939
  source 1..30: mol_type = other DNA

SEQ ID NO: 4830 - DNA, 30 bp, Botrytis paeoniae; identical to SEQ ID NO: 939
  source 1..30: mol_type = other DNA

SEQ ID NO: 4831 - DNA, 30 bp, Botrytis paeoniae; identical to SEQ ID NO: 939
  source 1..30: mol_type = other DNA

SEQ ID NO: 4832 - DNA, 33 bp, Botrytis porri
  source 1..33: mol_type = other DNA
tggtgcggacgccccggtcaaccatgcaagcgc

SEQ ID NO: 4833 - DNA, 39 bp, Botryotinia calthae
  source 1..39: mol_type = other DNA
tggtgcggacgccccggtcaaccatgcaaggagaagcgc

SEQ ID NO: 4834 - DNA, 30 bp, Sclerotinia borealis
  source 1..30: mol_type = other DNA
tggtgcggacgccctggacaaccatgtaag

SEQ ID NO: 4835 - DNA, 30 bp, Sclerotinia borealis; identical to SEQ ID NO: 619
  source 1..30: mol_type = other DNA

SEQ ID NO: 4836 - DNA, 42 bp, Rutstroemia sp.
  source 1..42: mol_type = other DNA; note = NJR-2017a BVV2
tggtgcggacgtcccggacagccctgccgtaaagtgcgtcgt

SEQ ID NO: 4837 - DNA, 30 bp, Rutstroemia sp.
  source 1..30: mol_type = other DNA; note = NJR-2017a BVV2
tggtgcggccgcccaggccaaccctgcaag

SEQ ID NO: 4838 - DNA, 33 bp, Rutstroemia sp.
  source 1..33: mol_type = other DNA; note = NJR-2017a BVV2
tggtgcggccgcccaggccaaccctgcaagcgc

SEQ ID NO: 4839 - DNA, 39 bp, Rutstroemia sp.
  source 1..39: mol_type = other DNA; note = NJR-2017a BBW
tggtgcggccgccccgggcaaccctgcaaagagaagcgc

SEQ ID NO: 4840 - DNA, 33 bp, Zymoseptoria brevis
  source 1..33: mol_type = other DNA
tggtgcggtgccatcggcgctccttgtgccaaa

SEQ ID NO: 4841 - DNA, 33 bp, Zymoseptoria brevis
  source 1..33: mol_type = other DNA
tggtgcggtgccattggtgcaccttgcgccaag

SEQ ID NO: 4842 - DNA, 33 bp, Zymoseptoria brevis; identical to SEQ ID NO: 4841
  source 1..33: mol_type = other DNA

SEQ ID NO: 4843 - DNA, 33 bp, Zymoseptoria brevis; identical to SEQ ID NO: 4841
  source 1..33: mol_type = other DNA

SEQ ID NO: 4844 - DNA, 42 bp, Trichoderma harzianum
  source 1..42: mol_type = other DNA
tggtgctaccgcatcggagagagttgctggattcccaagcga

SEQ ID NO: 4845 - DNA, 42 bp, Trichoderma arundinaceum
  source 1..42: mol_type = other DNA
tggtgctaccgcatcggccagccttgctggaaggccaagcga

SEQ ID NO: 4846 - DNA, 42 bp, Trichoderma longibrachiatum
  source 1..42: mol_type = other DNA
tggtgctaccgcatcggcgagccttgctggaaggccaagcgc

SEQ ID NO: 4847 - DNA, 42 bp, Trichoderma reesei; identical to SEQ ID NO: 4846
  source 1..42: mol_type = other DNA

SEQ ID NO: 4848 - DNA, 45 bp, Trichoderma virens
  source 1..45: mol_type = other DNA
tggtgctaccgcgttggtatgacttgcggctggaagaagaagaga

SEQ ID NO: 4849 - DNA, 42 bp, Coniochaeta sp.
  source 1..42: mol_type = other DNA; note = 2T2.1
tggtgctccgtcaagggcgagccgtgctggaagagcaagcgc

SEQ ID NO: 4850 - DNA, 33 bp, Metarhizium acridum
  source 1..33: mol_type = other DNA
tggtgctggcagcctggtcagccttgctggaag

SEQ ID NO: 4851 - DNA, 36 bp, Metarhizium acridum
  source 1..36: mol_type = other DNA
tggtgctggcagcctggtcagccttgctggaagaga

SEQ ID NO: 4852 - DNA, 42 bp, Trichoderma gamsii
  source 1..42: mol_type = other DNA
tggtgctggcgagtaggcgagtcttgctggaaggccaagcgc

SEQ ID NO: 4853 - DNA, 33 bp, Pochonia chlamydosporia
  source 1..33: mol_type = other DNA
tggtgctggcgtccaggccagccctgctggaag

SEQ ID NO: 4854 - DNA, 36 bp, Pochonia chlamydosporia
  source 1..36: mol_type = other DNA
tggtgctggcgtccaggccagccctgctggaagaga

SEQ ID NO: 4855 - DNA, 33 bp, Pochonia chlamydosporia
  source 1..33: mol_type = other DNA
tggtgctggcgtccaggccagtcctgctggaag

SEQ ID NO: 4856 - DNA, 36 bp, Pochonia chlamydosporia
  source 1..36: mol_type = other DNA
tggtgctggcgtccaggccagtcctgctggaagaga

SEQ ID NO: 4857 - DNA, 18 bp, Beauveria brongniartii
  source 1..18: mol_type = other DNA
tggtgcttacggcccggg

SEQ ID NO: 4858 - DNA, 18 bp, Beauveria brongniartii
  source 1..18: mol_type = other DNA
tggtgcttacggcccggg

SEQ ID NO: 4859 - DNA, 32 bp, Diaporthe ampelina
  source 1..32: mol_type = other DNA
tggtgcttctggaagggcaaggttgctggaag

SEQ ID NO: 4860 - DNA, 36 bp, Diaporthe ampelina
  source 1..36: mol_type = other DNA
tggtgcttctggaagggccaaggttgctggaagcgc

SEQ ID NO: 4861 - DNA, 30 bp, Botryotinia convoluta
  source 1..30: mol_type = other DNA
tggtgtggacgcccaggacaaccctgcaga

SEQ ID NO: 4862 - DNA, 27 bp, Sclerotinia borealis
  source 1..27: mol_type = other DNA
tggtgtggacgtcctggacaaccttgc

SEQ ID NO: 4863 - DNA, 42 bp, Coniochaeta sp.
  source 1..42: mol_type = other DNA; note = 2T2.1
tggtgttccgtcaagggcgagccgtgctacaagagcaagcgc

SEQ ID NO: 4864 - DNA, 33 bp, Pochonia chlamydosporia
  source 1..33: mol_type = other DNA
tggtgttggagacccggccagccatgctggaag

SEQ ID NO: 4865 - DNA, 42 bp, Pochonia chlamydosporia
  source 1..42: mol_type = other DNA
tggtgttggagacccggccagccatgctggaaggcgaagcgt

SEQ ID NO: 4866 - DNA, 39 bp, Hyaloscypha bicolor
  source 1..39: mol_type = other DNA
tgtggagcaagaggtcaaccctgtggaaaggccaagcgt

SEQ ID NO: 4867 - DNA, 39 bp, Chalara longipes
  source 1..39: mol_type = other DNA
tgtggagctcgaggacaaccctgtggcaaggccaagcgt

SEQ ID NO: 4868 - DNA, 27 bp, Chlorociboria aeruginascens
  source 1..27: mol_type = other DNA
tgtgggaggcccggtcaggggtgcaaa

SEQ ID NO: 4869 - DNA, 30 bp, Chlorociboria aeruginascens
  source 1..30: mol_type = other DNA
tgtgggaggcccggtcaggggtgcaaaaga

SEQ ID NO: 4870 - DNA, 42 bp, Chlorociboria aeruginascens
  source 1..42: mol_type = other DNA
tgtggtcgacccggtcaaggttgcaaggacaaagccaagaga

SEQ ID NO: 4871 - DNA, 30 bp, Lachnellula suecica
  source 1..30: mol_type = other DNA
tgtggtgcccgaggccaaggttgctacaag

SEQ ID NO: 4872 - DNA, 30 bp, Lachnellula suecica; identical to SEQ ID NO: 4871
  source 1..30: mol_type = other DNA

SEQ ID NO: 4873 - DNA, 30 bp, Lachnellula suecica; identical to SEQ ID NO: 4871
  source 1..30: mol_type = other DNA

SEQ ID NO: 4874 - DNA, 42 bp, Sporothrix insectorum
  source 1..42: mol_type = other DNA
ttctgcatgtggtttggccagtcctgctggaaggtcaagcgc

SEQ ID NO: 4875 - DNA, 42 bp, Ramularia collo-cygni
  source 1..42: mol_type = other DNA
ttctgcggtcctcgcggcgtctcctgcgcaaaggtcaagcgt

SEQ ID NO: 4876 - DNA, 36 bp, Diplodia corticola
  source 1..36: mol_type = other DNA
ttctgcggtcgtatcaggggccagccctgccacaag

SEQ ID NO: 4877 - DNA, 42 bp, Diplodia corticola
  source 1..42: mol_type = other DNA
ttctgcggtcgtatcaggggccagccctgccacaagaagcgc

SEQ ID NO: 4878 - DNA, 42 bp, Pseudogymnoascus sp.
  source 1..42: mol_type = other DNA; note = VKM F-4518 (FW-2643)
ttctgctggcgccctggccagccatgtggcaaggtcaagcgc

SEQ ID NO: 4879 - DNA, 42 bp, Pseudogymnoascus sp.
  source 1..42: mol_type = other DNA; note = VKM F-4518 (FW-2643)
ttctgctggcgtcctggccagccatgcggcaaagctaagcgt

SEQ ID NO: 4880 - DNA, 42 bp, Ramularia collo-cygni
  source 1..42: mol_type = other DNA
ttctgtggtccccgaggtgtctcctgcgccaaggccaagcgt

SEQ ID NO: 4881 - DNA, 18 bp, Verticillium alfalfae
  source 1..18: mol_type = other DNA
ttgccctggtcgaggaca

SEQ ID NO: 4882 - DNA, 18 bp, Verticillium alfalfae
  source 1..18: mol_type = other DNA
ttgccctggtcgaggaca

SEQ ID NO: 4883 - DNA, 18 bp, Glarea lozoyensis
  source 1..18: mol_type = other DNA
ttgtccatgacgctggca

SEQ ID NO: 4884 - DNA, 18 bp, Glarea lozoyensis
  source 1..18: mol_type = other DNA
ttgtccatggcgctggca

SEQ ID NO: 4885 - DNA, 21 bp, Glarea lozoyensis
  source 1..21: mol_type = other DNA
ttgtccatggcgctggcattg

SEQ ID NO: 4886 - DNA, 21 bp, Glarea lozoyensis
  source 1..21: mol_type = other DNA
ttgtccatggcgctggcattg

SEQ ID NO: 4887 - DNA, 18 bp, Glarea lozoyensis
  source 1..18: mol_type = other DNA
ttgtccgtgtctgatgca

SEQ ID NO: 4888 - DNA, 18 bp, Glarea lozoyensis
  source 1..18: mol_type = other DNA
ttgtccgtgtctgatgca

SEQ ID NO: 4889 - DNA, 33 bp, Neofusicoccum parvum
  source 1..33: mol_type = other DNA
tttcgagcagggctgacccttccagcgacacca

SEQ ID NO: 4890 - DNA, 33 bp, Zymoseptoria tritici
  source 1..33: mol_type = other DNA
tttggcacaaggagcgccgatggcaccgcacca

SEQ ID NO: 4891 - DNA, 33 bp, Zymoseptoria tritici; identical to SEQ ID NO: 4890
  source 1..33: mol_type = other DNA

SEQ ID NO: 4892 - DNA, 33 bp, Zymoseptoria tritici; identical to SEQ ID NO: 4890
  source 1..33: mol_type = other DNA

SEQ ID NO: 4893 - DNA, 33 bp, Zymoseptoria tritici; identical to SEQ ID NO: 4890
  source 1..33: mol_type = other DNA

SEQ ID NO: 4894 - DNA, 42 bp, Lasiodiplodia theobromae
  source 1..42: mol_type = other DNA
acgcttcttgtggcagggctgaccgcggatacggccacagaa

SEQ ID NO: 4895 - DNA, 42 bp, Lasiodiplodia theobromae; identical to SEQ ID NO: 4894
  source 1..42: mol_type = other DNA

SEQ ID NO: 4896 - DNA, 42 bp, Botrytis fragariae; identical to SEQ ID NO: 3655
  source 1..42: mol_type = other DNA

SEQ ID NO: 4897 - DNA, 33 bp, Monilinia fructigena
  source 1..33: mol_type = other DNA
acgcttgcatccttgtccgggacgtccgcacca

SEQ ID NO: 4898 - DNA, 33 bp, Botrytis fragariae
  source 1..33: mol_type = other DNA
acgcttgcatggttgaccgggtctagaagcata

SEQ ID NO: 4899 - DNA, 33 bp, Botrytis tulipae; identical to SEQ ID NO: 3626
  source 1..33: mol_type = other DNA

SEQ ID NO: 4900 - DNA, 33 bp, Botrytis cinerea; identical to SEQ ID NO: 3626
  source 1..33: mol_type = other DNA

SEQ ID NO: 4901 - DNA, 33 bp, Botrytis cinerea; identical to SEQ ID NO: 3626
  source 1..33: mol_type = other DNA

SEQ ID NO: 4902 - DNA, 33 bp, Botrytis cinerea; identical to SEQ ID NO: 3626
  source 1..33: mol_type = other DNA

SEQ ID NO: 4903 - DNA, 39 bp, Marssonina coronariae
  source 1..39: mol_type = other DNA
acgcttggcctttccgcatggctgtccgggttttccgca

SEQ ID NO: 4904 - DNA, 39 bp, Helotiales sp.
  source 1..39: mol_type = other DNA; note = DMI_Dod_QoI
acgcttggcctttccgcatggttgacctgggtatccgca

SEQ ID NO: 4905 - DNA, 39 bp, Pseudogymnoascus sp.
  source 1..39: mol_type = other DNA; note = VKM F-4514 (FW-929)
acgcttggctttaccgcatggctgaccgggacgccagca

SEQ ID NO: 4906 - DNA, 42 bp, Pseudogymnoascus sp.
  source 1..42: mol_type = other DNA; note = VKM F-4514 (FW-929)
acgcttggctttaccgcatggctgaccgggacgccagcagat

SEQ ID NO: 4907 - DNA, 39 bp, Pseudogymnoascus sp.
  source 1..39: mol_type = other DNA; note = VKM F-4246
acgcttggctttgccgcagggttgacccggaagccagca

SEQ ID NO: 4908 - DNA, 39 bp, Pseudogymnoascus sp.; identical to SEQ ID NO: 4907
  source 1..39: mol_type = other DNA; note = VKM F-4513 (FW-928)

SEQ ID NO: 4909 - DNA, 42 bp, Lophiostoma macrostomum
  source 1..42: mol_type = other DNA
acgcttggctttgccgcatggctgaccacggtagtggcagaa

SEQ ID NO: 4910 - DNA, 42 bp, Aspergillus mulundensis
  source 1..42: mol_type = other DNA
acgctttgacttatggcagacctgtccgggccacctgcacca

SEQ ID NO: 4911 - DNA, 39 bp, Mollisia scopiformis
  source 1..39: mol_type = other DNA
acgctttgctttgccacatggctgtcctgggtaaccaca

SEQ ID NO: 4912 - DNA, 39 bp, Lophium mytilinum
  source 1..39: mol_type = other DNA
acgcttttccttggagcaagattggcctgggagatggca

SEQ ID NO: 4913 - DNA, 33 bp, Botrytis galanthina
  source 1..33: mol_type = other DNA
acgtttacatggttgtccggggcgtccgcacca

SEQ ID NO: 4914 - DNA, 33 bp, Sclerotinia sclerotiorum
  source 1..33: mol_type = other DNA
acgtttgcatggttgtccgggacgtccgcacca

SEQ ID NO: 4915 - DNA, 27 bp, Lindgomyces ingoldianus
  source 1..27: mol_type = other DNA
agagcatggctggccgacgaggcggca

SEQ ID NO: 4916 - DNA, 30 bp, Lindgomyces ingoldianus
  source 1..30: mol_type = other DNA
agagcatggctggccgacgaggcggcaacg

SEQ ID NO: 4917 - DNA, 39 bp, Botrytis cinerea
  source 1..39: mol_type = other DNA
agcctcgcgcttacatggctgtcctgggcgtccgcacca

SEQ ID NO: 4918 - DNA, 39 bp, Botrytis cinerea; identical to SEQ ID NO: 4917
  source 1..39: mol_type = other DNA

SEQ ID NO: 4919 - DNA, 39 bp, Botrytis cinerea; identical to SEQ ID NO: 4917
  source 1..39: mol_type = other DNA

SEQ ID NO: 4920 - DNA, 36 bp, Botrytis fragariae
  source 1..36: mol_type = other DNA
agtacgcttacatggttgaccagggcgtccacacca

SEQ ID NO: 4921 - DNA, 36 bp, Botrytis cinerea
  source 1..36: mol_type = other DNA
agtacgcttacatggttgaccgggacgtccacacca

SEQ ID NO: 4922 - DNA, 36 bp, Botrytis cinerea; identical to SEQ ID NO: 4921
  source 1..36: mol_type = other DNA

SEQ ID NO: 4923 - DNA, 36 bp, Botrytis cinerea
  source 1..36: mol_type = other DNA
agtacgcttacatggttgacctggacgtccacacca

SEQ ID NO: 4924 - DNA, 42 bp, Pseudogymnoascus sp.
  source 1..42: mol_type = other DNA; note = VKM F-3557
atctgctggcgtcccggtcagccatgcggtaaagccaagcgt

SEQ ID NO: 4925 - DNA, 42 bp, Pseudogymnoascus sp.; identical to SEQ ID NO: 4924
  source 1..42: mol_type = other DNA; note = VKM F-4516 (FW-969)

SEQ ID NO: 4926 - DNA, 42 bp, Pseudogymnoascus sp.
  source 1..42: mol_type = other DNA; note = VKM F-4519 (FW-2642)
atctgctggcgtcctggccagccatgcggcaaagctaagcgt

SEQ ID NO: 4927 - DNA, 42 bp, Pseudogymnoascus sp.; identical to SEQ ID NO: 4534
  source 1..42: mol_type = other DNA; note = VKM F-103

SEQ ID NO: 4928 - DNA, 42 bp, Pseudogymnoascus sp.
  source 1..42: mol_type = other DNA; note = 05NY08
atctgttggcgccctggccagccatgcggcaaagccaagcgc

SEQ ID NO: 4929 - DNA, 42 bp, Pseudogymnoascus sp.
  source 1..42: mol_type = other DNA; note = WSF 3629
atctgttggcgtccaggccagccatgtggcaaagccaagcgc

SEQ ID NO: 4930 - DNA, 42 bp, Pseudogymnoascus sp.
  source 1..42: mol_type = other DNA; note = 03VT05
atctgttggcgtccaggccagccgtgcggtaaagccaagcgc

SEQ ID NO: 4931 - DNA, 30 bp, Stachybotrys chlorohalonata; identical to SEQ ID NO: 4300
  source 1..30: mol_type = other DNA

SEQ ID NO: 4932 - DNA, 36 bp, Diaporthe helianthi
  source 1..36: mol_type = other DNA
ccgcttccagcacccctcgcccttccagaagcacca

SEQ ID NO: 4933 - DNA, 36 bp, Colletotrichum gloeosporioides; identical to SEQ ID NO: 3744
  source 1..36: mol_type = other DNA

SEQ ID NO: 4934 - DNA, 42 bp, Ophiocordyceps camponoti-floridani; identical to SEQ ID NO: 4549
  source 1..42: mol_type = other DNA

SEQ ID NO: 4935 - DNA, 42 bp, Ophiocordyceps camponoti-floridani
  source 1..42: mol_type = other DNA
cctcttgaccttggagcagatggagttgggacgtgtgcacca

SEQ ID NO: 4936 - DNA, 42 bp, Ophiocordyceps camponoti-floridani; identical to SEQ ID NO: 4935
  source 1..42: mol_type = other DNA

SEQ ID NO: 4937 - DNA, 42 bp, Ophiocordyceps camponoti-floridani; identical to SEQ ID NO: 4935
  source 1..42: mol_type = other DNA

SEQ ID NO: 4938 - DNA, 42 bp, Ophiocordyceps camponoti-floridani
  source 1..42: mol_type = other DNA
cctcttgaccttggagcagatggagttgggtcgcttgcacca

SEQ ID NO: 4939 - DNA, 33 bp, Monilinia fructicola
  source 1..33: mol_type = other DNA
cctcttgcatccttgtccggggcgtccacacca

SEQ ID NO: 4940 - DNA, 42 bp, Metarhizium anisopliae; identical to SEQ ID NO: 3969
  source 1..42: mol_type = other DNA

SEQ ID NO: 4941 - DNA, 42 bp, Metarhizium anisopliae; identical to SEQ ID NO: 3969
  source 1..42: mol_type = other DNA

SEQ ID NO: 4942 - DNA, 42 bp, Metarhizium anisopliae; identical to SEQ ID NO: 3969
  source 1..42: mol_type = other DNA

SEQ ID NO: 4943 - DNA, 42 bp, Metarhizium anisopliae; identical to SEQ ID NO: 3969
  source 1..42: mol_type = other DNA

SEQ ID NO: 4944 - DNA, 36 bp, Dothistroma septosporum
  source 1..36: mol_type = other DNA
cgatgcaccgtccctggtcttgcttgcggcaagcgg

SEQ ID NO: 4945 - DNA, 30 bp, Botrytis fragariae; identical to SEQ ID NO: 4556
  source 1..30: mol_type = other DNA

SEQ ID NO: 4946 - DNA, 30 bp, Botrytis cinerea
  source 1..30: mol_type = other DNA
cttacatggttgaccgggacgtccacacca

SEQ ID NO: 4947 - DNA, 30 bp, Botrytis cinerea; identical to SEQ ID NO: 4946
  source 1..30: mol_type = other DNA

SEQ ID NO: 4948 - DNA, 30 bp, Botrytis fragariae; identical to SEQ ID NO: 4946
  source 1..30: mol_type = other DNA

SEQ ID NO: 4949 - DNA, 30 bp, Botrytis cinerea
  source 1..30: mol_type = other DNA
cttacatggttgacctggacgtccacacca

SEQ ID NO: 4950 - DNA, 30 bp, Botrytis galanthina
  source 1..30: mol_type = other DNA
cttacatggttgtccgggacgtccgcacca

SEQ ID NO: 4951 - DNA, 30 bp, Botrytis tulipae; identical to SEQ ID NO: 4950
  source 1..30: mol_type = other DNA

SEQ ID NO: 4952 - DNA, 30 bp, Botryotinia narcissicola
  source 1..30: mol_type = other DNA
cttacatggttgtcctgggcgtccgcacca

SEQ ID NO: 4953 - DNA, 33 bp, Cryphonectria parasitica
  source 1..33: mol_type = other DNA
cttccagcaaccttcgccgtggaagaggcacca

SEQ ID NO: 4954 - DNA, 33 bp, Cryphonectria parasitica; identical to SEQ ID NO: 4565
  source 1..33: mol_type = other DNA

SEQ ID NO: 4955 - DNA, 33 bp, Neurospora crassa; identical to SEQ ID NO: 4569
  source 1..33: mol_type = other DNA

SEQ ID NO: 4956 - DNA, 33 bp, Neurospora crassa; identical to SEQ ID NO: 4569
  source 1..33: mol_type = other DNA

SEQ ID NO: 4957 - DNA, 33 bp, Pyricularia grisea
  source 1..33: mol_type = other DNA
cttccagcacggctggccgcggcgagggcacca

SEQ ID NO: 4958 - DNA, 33 bp, Diaporthe helianthi
  source 1..33: mol_type = other DNA
cttccagcagccctcacccttccagaagcacca

SEQ ID NO: 4959 - DNA, 33 bp, Valsa mali; identical to SEQ ID NO: 4573
  source 1..33: mol_type = other DNA

SEQ ID NO: 4960 - DNA, 33 bp, Cryphonectria parasitica
  source 1..33: mol_type = other DNA
cttccagcagccctcgccgtggaacaggcacca

SEQ ID NO: 4961 - DNA, 33 bp, Neurospora crassa; identical to SEQ ID NO: 4576
  source 1..33: mol_type = other DNA

SEQ ID NO: 4962 - DNA, 33 bp, Neurospora crassa; identical to SEQ ID NO: 4576
  source 1..33: mol_type = other DNA

SEQ ID NO: 4963 - DNA, 33 bp, Neurospora crassa
  source 1..33: mol_type = other DNA
cttccagcaggactggccgtggatgcggcacca

SEQ ID NO: 4964 - DNA, 33 bp, Neurospora crassa; identical to SEQ ID NO: 4963
  source 1..33: mol_type = other DNA

SEQ ID NO: 4965 - DNA, 33 bp, Neurospora crassa; identical to SEQ ID NO: 4963
  source 1..33: mol_type = other DNA

SEQ ID NO: 4966 - DNA, 33 bp, Neurospora crassa; identical to SEQ ID NO: 4963
  source 1..33: mol_type = other DNA

SEQ ID NO: 4967 - DNA, 33 bp, Pyricularia sp.
  source 1..33: mol_type = other DNA; note = CBS 133598
cttccagcagggctgaccgcggcgcgggcacca

SEQ ID NO: 4968 - DNA, 33 bp, Pyricularia oryzae; identical to SEQ ID NO: 4581
  source 1..33: mol_type = other DNA

SEQ ID NO: 4969 - DNA, 30 bp, Venustampulla echinocandica
  source 1..30: mol_type = other DNA
cttccagcatccttggccgacgtgggtaca

SEQ ID NO: 4970 - DNA, 36 bp, Venustampulla echinocandica
  source 1..36: mol_type = other DNA
cttctccttccagcagccttgtccaacatgggtaca

SEQ ID NO: 4971 - DNA, 36 bp, Mollisia scopiformis
  source 1..36: mol_type = other DNA
cttgactttgccacagggttggccggggtaaccgca

SEQ ID NO: 4972 - DNA, 30 bp, Botryotinia narcissicola
  source 1..30: mol_type = other DNA
cttgcatggttgaccggggcgtccgcacca

SEQ ID NO: 4973 - DNA, 30 bp, Sclerotinia sclerotiorum
  source 1..30: mol_type = other DNA
cttgcatggttggcctgggcgtccgcacca

SEQ ID NO: 4974 - DNA, 30 bp, Lindgomyces ingoldianus
  source 1..30: mol_type = other DNA
cttggagcatggctgaccaacaagacggca

SEQ ID NO: 4975 - DNA, 36 bp, Ophiocordyceps camponoti-floridani
  source 1..36: mol_type = other DNA
cttggggccacactgcgagttgggacgtgtgcacca

SEQ ID NO: 4976 - DNA, 36 bp, Lasiodiplodia theobromae
  source 1..36: mol_type = other DNA
cttgtggcaaggctggccgcggatgcggccgcagaa

SEQ ID NO: 4977 - DNA, 36 bp, Lasiodiplodia theobromae; identical to SEQ ID NO: 4976
  source 1..36: mol_type = other DNA

SEQ ID NO: 4978 - DNA, 42 bp, Pseudogymnoascus sp.
  source 1..42: mol_type = other DNA; note = 23342-1-I1
gcgcttagcctttccgcacggctgtccagggcgccagcagaa

SEQ ID NO: 4979 - DNA, 36 bp, Colletotrichum siamense
  source 1..36: mol_type = other DNA
gcgcttccagcaaggctggccaggcttcgtgcacca

SEQ ID NO: 4980 - DNA, 36 bp, Colletotrichum fructicola; identical to SEQ ID NO: 4605
  source 1..36: mol_type = other DNA

SEQ ID NO: 4981 - DNA, 36 bp, Colletotrichum fructicola; identical to SEQ ID NO: 4605
  source 1..36: mol_type = other DNA

SEQ ID NO: 4982 - DNA, 36 bp, Colletotrichum fructicola; identical to SEQ ID NO: 4605
  source 1..36: mol_type = other DNA

SEQ ID NO: 4983 - DNA, 36 bp, Pyricularia oryzae
  source 1..36: mol_type = other DNA
gcgcttccagcaaggctggcctcggcgcgggcacca

SEQ ID NO: 4984 - DNA, 36 bp, Valsa mali
  source 1..36: mol_type = other DNA
gcgcttccagcacccttcacccttgaacaggcacca

SEQ ID NO: 4985 - DNA, 36 bp, Pyricularia grisea
  source 1..36: mol_type = other DNA
gcgcttccagcacggctggccccggcgtgggcacca

SEQ ID NO: 4986 - DNA, 36 bp, Colletotrichum siamense
  source 1..36: mol_type = other DNA
gcgcttccagcacggttggccgggcttggtgcacca

SEQ ID NO: 4987 - DNA, 36 bp, Colletotrichum siamense; identical to SEQ ID NO: 4986
  source 1..36: mol_type = other DNA

SEQ ID NO: 4988 - DNA, 36 bp, Colletotrichum siamense; identical to SEQ ID NO: 4986
  source 1..36: mol_type = other DNA

SEQ ID NO: 4989 - DNA, 36 bp, Sporothrix brasiliensis; identical to SEQ ID NO: 4609
  source 1..36: mol_type = other DNA

SEQ ID NO: 4990 - DNA, 36 bp, Pyricularia sp.
  source 1..36: mol_type = other DNA; note = CBS 133598
gcgcttccagcagggctgaccgcggcgcgggcacca

SEQ ID NO: 4991 - DNA, 36 bp, Colletotrichum viniferum
  source 1..36: mol_type = other DNA
gcgcttccagcagggctggccgggcttagtgcacca

SEQ ID NO: 4992 - DNA, 42 bp, Stachybotrys chlorohalonata
  source 1..42: mol_type = other DNA
gcgcttcgctttccagcaaggctgcccaggacgggtgcacca

SEQ ID NO: 4993 - DNA, 42 bp, Delitschia confertaspora
  source 1..42: mol_type = other DNA
gcgcttctccttggagcaggactggccggggaagcggcagtt

SEQ ID NO: 4994 - DNA, 39 bp, Rutstroemia sp.
  source 1..39: mol_type = other DNA; note = NJR-2017a WRK4
gcgcttctctttgcagggttgcccggggcggccgcacca

SEQ ID NO: 4995 - DNA, 42 bp, Ophiostoma piceae
  source 1..42: mol_type = other DNA
gcgcttgaccttccagcagggctggccgaccatggggcacca

SEQ ID NO: 4996 - DNA, 39 bp, Helotiales sp.
  source 1..39: mol_type = other DNA; note = DMI_Dod_QoI
gcgcttgactttaccgcatggctgaccggggtatccaca

SEQ ID NO: 4997 - DNA, 39 bp, Pseudogymnoascus verrucosus
  source 1..39: mol_type = other DNA
gcgcttgactttgccgcagggctggccggggcgccagca

SEQ ID NO: 4998 - DNA, 39 bp, Pseudogymnoascus sp.; identical to SEQ ID NO: 4997
  source 1..39: mol_type = other DNA; note = 24MN13

SEQ ID NO: 4999 - DNA, 42 bp, Trichoderma asperellum
  source 1..42: mol_type = other DNA
gcgcttggccttccagcaagactcgccaactcgccagcacca

SEQ ID NO: 5000 - DNA, 42 bp, Trichoderma asperellum; identical to SEQ ID NO: 4999
  source 1..42: mol_type = other DNA

SEQ ID NO: 5001 - DNA, 42 bp, Trichoderma atroviride
  source 1..42: mol_type = other DNA
gcgcttggccttccagcaagactcgcccactcgccagcacca

SEQ ID NO: 5002 - DNA, 42 bp, Trichoderma gamsii; identical to SEQ ID NO: 5001
  source 1..42: mol_type = other DNA

SEQ ID NO: 5003 - DNA, 42 bp, Stachybotrys chartarum
  source 1..42: mol_type = other DNA
gcgcttggccttccagcacggctgcccgggacgtgtgcacca

SEQ ID NO: 5004 - DNA, 42 bp, Stachybotrys chartarum; identical to SEQ ID NO: 5003
  source 1..42: mol_type = other DNA

SEQ ID NO: 5005 - DNA, 42 bp, Neofusicoccum parvum
  source 1..42: mol_type = other DNA
gcgcttggccttcgagcaaggctggcccttccagcggcacca

SEQ ID NO: 5006 - DNA, 24 bp, Pseudogymnoascus sp.
  source 1..24: mol_type = other DNA; note = 24MN13
gcgcttggctttgccgcacggctg

SEQ ID NO: 5007 - DNA, 39 bp, Pseudogymnoascus verrucosus
  source 1..39: mol_type = other DNA
gcgcttggctttgccgcacggctggcctggacgccagca

SEQ ID NO: 5008 - DNA, 42 bp, Pseudogymnoascus verrucosus
  source 1..42: mol_type = other DNA
gcgcttggctttgccgcacggctggcctggacgccagcagat

SEQ ID NO: 5009 - DNA, 42 bp, Pseudogymnoascus sp.; identical to SEQ ID NO: 5008
  source 1..42: mol_type = other DNA; note = 24MN13

SEQ ID NO: 5010 - DNA, 39 bp, Lophium mytilinum
  source 1..39: mol_type = other DNA
gcgcttgtccttgctgcaagactggcctggaagatggca

SEQ ID NO: 5011 - DNA, 45 bp, Lophium mytilinum
  source 1..45: mol_type = other DNA
gcgcttgtctttgctgcaagactggcctgggagatgacaacccca

SEQ ID NO: 5012 - DNA, 39 bp, Drechmeria coniospora
  source 1..39: mol_type = other DNA
gcgtttcttccagcatccgcttccgggacgggtgcacca

SEQ ID NO: 5013 - DNA, 33 bp, Rutstroemia sp.
  source 1..33: mol_type = other DNA; note = NJR-2017a WRK4
gcgtttgcagggttgcccgggacggccgcacca

SEQ ID NO: 5014 - DNA, 42 bp, Pseudogymnoascus sp.
  source 1..42: mol_type = other DNA; note = VKM F-4517 (FW-2822)
gcgtttggccttcccgcagggctggcctggacgccagcagta

SEQ ID NO: 5015 - DNA, 30 bp, Cenococcum geophilum
  source 1..30: mol_type = other DNA
ggctgccatcttcccggccaatcttgcggt

SEQ ID NO: 5016 - DNA, 42 bp, Mytilinidion resinicola
  source 1..42: mol_type = other DNA
tactgccatctccccggccagtcttgcagcaaggacaaacgc

SEQ ID NO: 5017 - DNA, 42 bp, Pseudogymnoascus sp.
  source 1..42: mol_type = other DNA; note = VKM F-4515 (FW-2607)
tactgctggcgtcctggccagccatgcggcaaggccaagcgt

SEQ ID NO: 5018 - DNA, 39 bp, Botryosphaeria dothidea
  source 1..39: mol_type = other DNA
tactgtcacttccgcggctccgcctgtcctaagaagcgt

SEQ ID NO: 5019 - DNA, 39 bp, Botryosphaeria dothidea; identical to SEQ ID NO: 5018
  source 1..39: mol_type = other DNA

SEQ ID NO: 5020 - DNA, 42 bp, Trichoderma harzianum
  source 1..42: mol_type = other DNA
tcgcttggggatccagcaaggcattccgatgcggtagcacca

SEQ ID NO: 5021 - DNA, 36 bp, Metarhizium rileyi
  source 1..36: mol_type = other DNA
tctcttccagcaaggctgtcctggtcgccagcacca

SEQ ID NO: 5022 - DNA, 36 bp, Metarhizium rileyi; identical to SEQ ID NO: 5021
  source 1..36: mol_type = other DNA

SEQ ID NO: 5023 - DNA, 42 bp, Aspergillus fumigatiaffinis; identical to SEQ ID NO: 3424
  source 1..42: mol_type = other DNA

SEQ ID NO: 5024 - DNA, 42 bp, Aspergillus fumigatiaffinis; identical to SEQ ID NO: 3424
  source 1..42: mol_type = other DNA

SEQ ID NO: 5025 - DNA, 39 bp, Lachnellula willkommii; identical to SEQ ID NO: 4676
  source 1..39: mol_type = other DNA

SEQ ID NO: 5026 - DNA, 39 bp, Lachnellula subtilissima; identical to SEQ ID NO: 4676
  source 1..39: mol_type = other DNA

SEQ ID NO: 5027 - DNA, 42 bp, Drechmeria coniospora
  source 1..42: mol_type = other DNA
tctcttgaccttccagcaaccacttccggggcgagtgcacca

SEQ ID NO: 5028 - DNA, 30 bp, Coleophoma cylindrospora
  source 1..30: mol_type = other DNA
tctcttgcatggttgacccatacgtccgca

SEQ ID NO: 5029 - DNA, 45 bp, Tothia fuscella
  source 1..45: mol_type = other DNA
tctcttggcctttccacatggctggccacgacggaagcatcgcca

SEQ ID NO: 5030 - DNA, 39 bp, Venustampulla echinocandica
  source 1..39: mol_type = other DNA
tctcttgtctttccagcagccctggccgacgtgggtgca

SEQ ID NO: 5031 - DNA, 30 bp, Sodiomyces alkalinus
  source 1..30: mol_type = other DNA
tgcaccaagcccgggcagccttgctggaag

SEQ ID NO: 5032 - DNA, 39 bp, Sodiomyces alkalinus
  source 1..39: mol_type = other DNA
tgcaccaagcccggtcaaccgtgctggaagaacaagcgt

SEQ ID NO: 5033 - DNA, 33 bp, Dothistroma septosporum
  source 1..33: mol_type = other DNA
tgcaccgtccccggtcttgcctgcggtaagcgc

SEQ ID NO: 5034 - DNA, 39 bp, Mytilinidion resinicola
  source 1..39: mol_type = other DNA
tgccatctccccggccaatcttgcagcaaagataaacgc

SEQ ID NO: 5035 - DNA, 39 bp, Glonium stellatum
  source 1..39: mol_type = other DNA
tgccatcttcccggtcaatcatgccccaaggacaagcgt

SEQ ID NO: 5036 - DNA, 36 bp, Polyplosphaeria fusca
  source 1..36: mol_type = other DNA
tgccgcttcccaggctcgttctgcggcaagaagagg

SEQ ID NO: 5037 - DNA, 36 bp, Lophiotrema nucula
  source 1..36: mol_type = other DNA
tgccgcttcccgggacaaccatgctccaagaagcgt

SEQ ID NO: 5038 - DNA, 39 bp, Diplocarpon rosae
  source 1..39: mol_type = other DNA
tgcggacacccaggccagccctgtggtaaggcaaagcgc

SEQ ID NO: 5039 - DNA, 39 bp, Diplocarpon rosae
  source 1..39: mol_type = other DNA
tgcggacaccccggacaaccttgcggcaaggccaagcgt

SEQ ID NO: 5040 - DNA, 39 bp, Amorphotheca resinae
  source 1..39: mol_type = other DNA
tgcggcaaggtcggacaaccctgtggaaaggcaaagcgt

SEQ ID NO: 5041 - DNA, 30 bp, Cadophora sp.
  source 1..30: mol_type = other DNA; note = DSE1049
tgcgggcaccccggacaaccttgcggcaag

SEQ ID NO: 5042 - DNA, 33 bp, Cadophora sp.
  source 1..33: mol_type = other DNA; note = DSE1049
tgcgggcaccccggacaaccttgcggcaagcgc

SEQ ID NO: 5043 - DNA, 39 bp, Pseudogymnoascus sp.
  source 1..39: mol_type = other DNA; note = VKM F-3557
tgctggcgtccaggtcaaccatgtggcaaggccaagcgt

SEQ ID NO: 5044 - DNA, 39 bp, Pseudogymnoascus sp.; identical to SEQ ID NO: 5043
  source 1..39: mol_type = other DNA; note = VKM F-4516 (FW-969)

SEQ ID NO: 5045 - DNA, 39 bp, Pseudogymnoascus sp.; identical to SEQ ID NO: 4721
  source 1..39: mol_type = other DNA; note = VKM F-103

SEQ ID NO: 5046 - DNA, 39 bp, Pseudogymnoascus sp.; identical to SEQ ID NO: 4721
  source 1..39: mol_type = other DNA; note = 03VT05

SEQ ID NO: 5047 - DNA, 39 bp, Pseudogymnoascus sp.; identical to SEQ ID NO: 4721
  source 1..39: mol_type = other DNA; note = VKM F-4519 (FW-2642)

SEQ ID NO: 5048 - DNA, 39 bp, Pseudogymnoascus sp.; identical to SEQ ID NO: 4721
  source 1..39: mol_type = other DNA; note = 05NY08

SEQ ID NO: 5049 - DNA, 39 bp, Pseudogymnoascus sp.
  source 1..39: mol_type = other DNA; note = VKM F-4519 (FW-2642)
tgctggcgtcctggccagccatgcggcaaagctaagcgt

SEQ ID NO: 5050 - DNA, 39 bp, Pseudogymnoascus sp.; identical to SEQ ID NO: 4722
  source 1..39: mol_type = other DNA; note = VKM F-103

SEQ ID NO: 5051 - DNA, 42 bp, Zasmidium cellare
  source 1..42: mol_type = other DNA; strain = ATCC 36951
tggaagtgtggtgtccccggccaggcctgcaacaagaagcgc

SEQ ID NO: 5052 - DNA, 27 bp, Aspergillus lentulus
  source 1..27: mol_type = other DNA
tggacacatgcgagtgggcaaggatcg

SEQ ID NO: 5053 - DNA, 27 bp, Aspergillus lentulus
  source 1..27: mol_type = other DNA
tggacacatgcgagtgggcaaggatcg

SEQ ID NO: 5054 - DNA, 36 bp, Aspergillus lentulus
  source 1..36: mol_type = other DNA
tggacacatgcgagtgggcaaggatcgcgaatcatg

SEQ ID NO: 5055 - DNA, 36 bp, Aspergillus lentulus; identical to SEQ ID NO: 5054
  source 1..36: mol_type = other DNA

SEQ ID NO: 5056 - DNA, 45 bp, Mytilinidion resinicola
  source 1..45: mol_type = other DNA
tggggttgccatcttccgggccagtcttgcagcaaggacaagcgc

SEQ ID NO: 5057 - DNA, 42 bp, Coniochaeta ligniaria
  source 1..42: mol_type = other DNA
tggtgcaacatccgtggcgagccctgctggaagagcaagcgg

SEQ ID NO: 5058 - DNA, 33 bp, Purpureocillium lilacinum
  source 1..33: mol_type = other DNA
tggtgcaaccgccctggccagccctgcaagcgg

SEQ ID NO: 5059 - DNA, 33 bp, Purpureocillium lilacinum; identical to SEQ ID NO: 5058
  source 1..33: mol_type = other DNA

SEQ ID NO: 5060 - DNA, 33 bp, Purpureocillium lilacinum; identical to SEQ ID NO: 5058
  source 1..33: mol_type = other DNA

SEQ ID NO: 5061 - DNA, 42 bp, Escovopsis weberi
  source 1..42: mol_type = other DNA
tggtgcaccaacccgggccagggctgctggaaggccaagcgt

SEQ ID NO: 5062 - DNA, 36 bp, Colletotrichum tropicale
  source 1..36: mol_type = other DNA
tggtgcaccaagcccggccagccctgctggaaacgc

SEQ ID NO: 5063 - DNA, 36 bp, Colletotrichum aenigma
  source 1..36: mol_type = other DNA
tggtgcaccaagcccggccagccctgctggaagcgc

SEQ ID NO: 5064 - DNA, 42 bp, Madurella mycetomatis
  source 1..42: mol_type = other DNA
tggtgcaccggtttcccgggacaaccctgctggaagaagcgc

SEQ ID NO: 5065 - DNA, 36 bp, Thermothielavioides terrestris
  source 1..36: mol_type = other DNA
tggtgcaccttcttcctggggcagccgtgctggaag

SEQ ID NO: 5066 - DNA, 39 bp, Thermothielavioides terrestris
  source 1..39: mol_type = other DNA
tggtgcaccttcttcctggggcagccgtgctggaagcgc

SEQ ID NO: 5067 - DNA, 36 bp, Colletotrichum asianum
  source 1..36: mol_type = other DNA
tggtgcacgaagcctgggcagccgtgctggaagagg

SEQ ID NO: 5068 - DNA, 36 bp, Colletotrichum fructicola; identical to SEQ ID NO: 5067
  source 1..36: mol_type = other DNA

SEQ ID NO: 5069 - DNA, 36 bp, Colletotrichum fructicola; identical to SEQ ID NO: 5067
  source 1..36: mol_type = other DNA

SEQ ID NO: 5070 - DNA, 36 bp, Colletotrichum fructicola; identical to SEQ ID NO: 5067
  source 1..36: mol_type = other DNA

SEQ ID NO: 5071 - DNA, 36 bp, Colletotrichum fructicola; identical to SEQ ID NO: 5067
  source 1..36: mol_type = other DNA

SEQ ID NO: 5072 - DNA, 36 bp, Colletotrichum siamense; identical to SEQ ID NO: 5067
  source 1..36: mol_type = other DNA

SEQ ID NO: 5073 - DNA, 33 bp, Phaeoacremonium minimum; identical to SEQ ID NO: 4757
  source 1..33: mol_type = other DNA

SEQ ID NO: 5074 - DNA, 36 bp, Phaeoacremonium minimum
  source 1..36: mol_type = other DNA
tggtgcactaagcacggccagtcatgctggaagcgg

SEQ ID NO: 5075 - DNA, 33 bp, Drechmeria coniospora
  source 1..33: mol_type = other DNA
tggtgcactcgtcccggcagcggctgctggaag

SEQ ID NO: 5076 - DNA, 42 bp, Drechmeria coniospora
  source 1..42: mol_type = other DNA
tggtgcactcgtcccggcagcggctgctggaaggtgaagcgg

SEQ ID NO: 5077 - DNA, 42 bp, Stachybotrys chartarum
  source 1..42: mol_type = other DNA
tggtgcactcgtcccgggcagccgtgctggaaagcgaagcgc

SEQ ID NO: 5078 - DNA, 36 bp, Madurella mycetomatis
  source 1..36: mol_type = other DNA
tggtgcactggcttccccggccagccttgctggaag

SEQ ID NO: 5079 - DNA, 45 bp, Madurella mycetomatis
  source 1..45: mol_type = other DNA
tggtgcactggcttccctggccagccgtgttggaagttgaagcgc

SEQ ID NO: 5080 - DNA, 36 bp, Beauveria bassiana
  source 1..36: mol_type = other DNA
tggtgcatgagacccggtcagccgtgctggaagcgc

SEQ ID NO: 5081 - DNA, 36 bp, Beauveria bassiana; identical to SEQ ID NO: 5080
  source 1..36: mol_type = other DNA

SEQ ID NO: 5082 - DNA, 36 bp, Beauveria bassiana; identical to SEQ ID NO: 5080
  source 1..36: mol_type = other DNA

SEQ ID NO: 5083 - DNA, 36 bp, Beauveria bassiana; identical to SEQ ID NO: 5080
  source 1..36: mol_type = other DNA

SEQ ID NO: 5084 - DNA, 42 bp, Aspergillus fumigatiaffinis; identical to SEQ ID NO: 3441
  source 1..42: mol_type = other DNA

SEQ ID NO: 5085 - DNA, 42 bp, Aspergillus fumigatiaffinis; identical to SEQ ID NO: 3441
  source 1..42: mol_type = other DNA

SEQ ID NO: 5086 - DNA, 33 bp, Phialemoniopsis curvata
  source 1..33: mol_type = other DNA
tggtgcccgatccggggccagccgtgctggaag

SEQ ID NO: 5087 - DNA, 33 bp, Pyricularia oryzae
  source 1..33: mol_type = other DNA
tggtgcccgcgccgaggccagccttgctggaag

SEQ ID NO: 5088 - DNA, 33 bp, Pyricularia oryzae; identical to SEQ ID NO: 5087
  source 1..33: mol_type = other DNA

SEQ ID NO: 5089 - DNA, 33 bp, Pyricularia oryzae; identical to SEQ ID NO: 5087
  source 1..33: mol_type = other DNA

SEQ ID NO: 5090 - DNA, 36 bp, Pyricularia oryzae
  source 1..36: mol_type = other DNA
tggtgcccgcgccgaggccagccttgctggaagcgc

SEQ ID NO: 5091 - DNA, 36 bp, Pyricularia oryzae; identical to SEQ ID NO: 5090
  source 1..36: mol_type = other DNA

SEQ ID NO: 5092 - DNA, 36 bp, Pyricularia oryzae; identical to SEQ ID NO: 5090
  source 1..36: mol_type = other DNA

SEQ ID NO: 5093 - DNA, 33 bp, Pyricularia pennisetigena
  source 1..33: mol_type = other DNA
tggtgccctcgccgcggccagccctgctggaag

SEQ ID NO: 5094 - DNA, 36 bp, Pyricularia pennisetigena
  source 1..36: mol_type = other DNA
tggtgccctcgccgcggccagccctgctggaagcgc

SEQ ID NO: 5095 - DNA, 42 bp, Neurospora tetrasperma; identical to SEQ ID NO: 4792
  source 1..42: mol_type = other DNA

SEQ ID NO: 5096 - DNA, 36 bp, Neurospora tetrasperma
  source 1..36: mol_type = other DNA
tggtgccgcattcacggtcagtcctgctggaagcgt

SEQ ID NO: 5097 - DNA, 33 bp, Neurospora tetrasperma; identical to SEQ ID NO: 4794
  source 1..33: mol_type = other DNA

SEQ ID NO: 5098 - DNA, 33 bp, Neurospora tetrasperma
  source 1..33: mol_type = other DNA
tggtgccggatccacggccagtcgtgctggaag

SEQ ID NO: 5099 - DNA, 33 bp, Neurospora tetrasperma; identical to SEQ ID NO: 4797
  source 1..33: mol_type = other DNA

SEQ ID NO: 5100 - DNA, 33 bp, Neurospora tetrasperma; identical to SEQ ID NO: 4797
  source 1..33: mol_type = other DNA

SEQ ID NO: 5101 - DNA, 33 bp, Sordaria macrospora
  source 1..33: mol_type = other DNA
tggtgccggatccatggccagtcttgctggaag

SEQ ID NO: 5102 - DNA, 33 bp, Sordaria macrospora; identical to SEQ ID NO: 5101
  source 1..33: mol_type = other DNA

SEQ ID NO: 5103 - DNA, 33 bp, Sordaria macrospora; identical to SEQ ID NO: 5101
  source 1..33: mol_type = other DNA

SEQ ID NO: 5104 - DNA, 33 bp, Sordaria macrospora; identical to SEQ ID NO: 5101
  source 1..33: mol_type = other DNA

SEQ ID NO: 5105 - DNA, 36 bp, Cytospora leucostoma
  source 1..36: mol_type = other DNA
tggtgcctcctgaagggccagggctgctggaagcgc

SEQ ID NO: 5106 - DNA, 33 bp, Valsa sordida
  source 1..33: mol_type = other DNA
tggtgcctgctcaagggccagggctgctggaag

SEQ ID NO: 5107 - DNA, 36 bp, Valsa sordida
  source 1..36: mol_type = other DNA
tggtgcctgctcaagggccagggctgctggaagcgt

SEQ ID NO: 5108 - DNA, 36 bp, Valsa malicola; identical to SEQ ID NO: 5107
  source 1..36: mol_type = other DNA

SEQ ID NO: 5109 - DNA, 33 bp, Valsa mali
  source 1..33: mol_type = other DNA
tggtgcctgttcaagggcgagggctgctggaaa

SEQ ID NO: 5110 - DNA, 42 bp, Valsa mali
  source 1..42: mol_type = other DNA
tggtgcctgttcaagggcgagggctgctggaaagtcaagcgt

SEQ ID NO: 5111 - DNA, 33 bp, Coniella lustricola; identical to SEQ ID NO: 4815
  source 1..33: mol_type = other DNA

SEQ ID NO: 5112 - DNA, 36 bp, Coniella lustricola
  source 1..36: mol_type = other DNA
tggtgcctgttccacggcgagggctgctggaagcgt

SEQ ID NO: 5113 - DNA, 33 bp, Coniella lustricola
  source 1..33: mol_type = other DNA
tggtgcctgtttcacggcgagggctgctggaag

SEQ ID NO: 5114 - DNA, 33 bp, Botrytis elliptica
  source 1..33: mol_type = other DNA
tggtgcggacgcccaggacagccatgtaagcgc

SEQ ID NO: 5115 - DNA, 30 bp, Botryotinia convoluta
  source 1..30: mol_type = other DNA
tggtgcggacgccccggacaaccatgtaaa

SEQ ID NO: 5116 - DNA, 33 bp, Botryotinia convoluta
  source 1..33: mol_type = other DNA
tggtgcggacgccccggacaaccatgtaaacgt

SEQ ID NO: 5117 - DNA, 30 bp, Sclerotinia sclerotiorum
  source 1..30: mol_type = other DNA
tggtgcggacgccccggccaaccatgcaaa

SEQ ID NO: 5118 - DNA, 39 bp, Sclerotinia sclerotiorum
  source 1..39: mol_type = other DNA
tggtgcggacgccccggccaaccatgcaaagagaagcgc

SEQ ID NO: 5119 - DNA, 33 bp, Monilinia laxa
  source 1..33: mol_type = other DNA
tggtgcggacgccccggccaaggctgcaaacgt

SEQ ID NO: 5120 - DNA, 27 bp, Botrytis hyacinthi
  source 1..27: mol_type = other DNA
tggtgcggacgccccggtcaaccatgc

SEQ ID NO: 5121 - DNA, 30 bp, Botrytis hyacinthi; identical to SEQ ID NO: 939
  source 1..30: mol_type = other DNA

SEQ ID NO: 5122 - DNA, 33 bp, Botrytis hyacinthi; identical to SEQ ID NO: 4832
  source 1..33: mol_type = other DNA

SEQ ID NO: 5123 - DNA, 33 bp, Botrytis paeoniae; identical to SEQ ID NO: 4832
  source 1..33: mol_type = other DNA

SEQ ID NO: 5124 - DNA, 39 bp, Botrytis paeoniae
  source 1..39: mol_type = other DNA
tggtgcggacgccccggtcaaccatgcaaggagaagcgt

SEQ ID NO: 5125 - DNA, 33 bp, Sclerotinia borealis
  source 1..33: mol_type = other DNA
tggtgcggacgccctggtcaaccatgcaagcgt

SEQ ID NO: 5126 - DNA, 30 bp, Botryotinia calthae
  source 1..30: mol_type = other DNA
tggtgcggacgtcccggacaaccatgcaag

SEQ ID NO: 5127 - DNA, 33 bp, Botryotinia calthae
  source 1..33: mol_type = other DNA
tggtgcggacgtcccggacaaccatgcaagcgt

SEQ ID NO: 5128 - DNA, 33 bp, Botryotinia calthae; identical to SEQ ID NO: 5127
  source 1..33: mol_type = other DNA

SEQ ID NO: 5129 - DNA, 30 bp, Sclerotinia borealis
  source 1..30: mol_type = other DNA
tggtgcggacgtcccggacaaccctgcaag

SEQ ID NO: 5130 - DNA, 30 bp, Rutstroemia sp.; identical to SEQ ID NO: 747
  source 1..30: mol_type = other DNA; note = NJR-2017a BVV2

SEQ ID NO: 5131 - DNA, 33 bp, Rutstroemia sp.
  source 1..33: mol_type = other DNA; note = NJR-2017a BVV2
tggtgcggccgccccggccaaccctgcaaacgc

SEQ ID NO: 5132 - DNA, 30 bp, Rutstroemia sp.
  source 1..30: mol_type = other DNA; note = NJR-2017a BBW
tggtgcggccgccccgggcaaccctgcaaa

SEQ ID NO: 5133 - DNA, 30 bp, Rutstroemia sp.
  source 1..30: mol_type = other DNA; note = NJR-2017a BBW
tggtgcggccgccccggtcaaccctgcaaa

SEQ ID NO: 5134 - DNA, 33 bp, Zymoseptoria brevis
  source 1..33: mol_type = other DNA
tggtgcggtgccatcggtgccccatgcgccaaa

SEQ ID NO: 5135 - DNA, 42 bp, Trichoderma longibrachiatum
  source 1..42: mol_type = other DNA
tggtgctaccgcatcggcgagccttgctggaaggctaagcgc

SEQ ID NO: 5136 - DNA, 42 bp, Trichoderma gamsii
  source 1..42: mol_type = other DNA
tggtgctggcgcgtcggcgagtcttgttggaaggccaagcgc

SEQ ID NO: 5137 - DNA, 32 bp, Diaporthe ampelina; identical to SEQ ID NO: 4859
  source 1..32: mol_type = other DNA

SEQ ID NO: 5138 - DNA, 33 bp, Diaporthe ampelina
  source 1..33: mol_type = other DNA
tggtgcttctggaagggccagggctgctggaag

SEQ ID NO: 5139 - DNA, 39 bp, Chaetomium thermophilum
  source 1..39: mol_type = other DNA
tggtgtacccgcttccccggccagccatgttggaaacgt

SEQ ID NO: 5140 - DNA, 18 bp, Purpureocillium lilacinum
  source 1..18: mol_type = other DNA
tggtgtacgcgacgcggg

SEQ ID NO: 5141 - DNA, 33 bp, Sordaria macrospora
  source 1..33: mol_type = other DNA
tggtgtcggatccatggccagtcctgctggaag

SEQ ID NO: 5142 - DNA, 33 bp, Sordaria macrospora; identical to SEQ ID NO: 5141
  source 1..33: mol_type = other DNA

SEQ ID NO: 5143 - DNA, 33 bp, Sordaria macrospora; identical to SEQ ID NO: 5141
  source 1..33: mol_type = other DNA

SEQ ID NO: 5144 - DNA, 33 bp, Sordaria macrospora; identical to SEQ ID NO: 5141
  source 1..33: mol_type = other DNA

SEQ ID NO: 5145 - DNA, 33 bp, Sordaria macrospora; identical to SEQ ID NO: 5141
  source 1..33: mol_type = other DNA

SEQ ID NO: 5146 - DNA, 33 bp, Sordaria macrospora; identical to SEQ ID NO: 5141
  source 1..33: mol_type = other DNA

SEQ ID NO: 5147 - DNA, 33 bp, Botrytis porri
  source 1..33: mol_type = other DNA
tggtgtggacgtcccggacaaccatgtaaacgt

SEQ ID NO: 5148 - DNA, 42 bp, Coniochaeta sp.
  source 1..42: mol_type = other DNA; note = 2T2.1
tggtgttccgttaaaggagagccgtgctggaagtccaagcgt

SEQ ID NO: 5149 - DNA, 33 bp, Pochonia chlamydosporia; identical to SEQ ID NO: 4864
  source 1..33: mol_type = other DNA

SEQ ID NO: 5150 - DNA, 42 bp, Pochonia chlamydosporia; identical to SEQ ID NO: 4865
  source 1..42: mol_type = other DNA

SEQ ID NO: 5151 - DNA, 39 bp, Hyaloscypha bicolor
  source 1..39: mol_type = other DNA; strain = E
tgtggagctcgagggcagccttgcggtaaagcaaagcgc

SEQ ID NO: 5152 - DNA, 39 bp, Drepanopeziza brunnea
  source 1..39: mol_type = other DNA
tgtggctaccgcggacagccatgccccaaggccaagcgt

SEQ ID NO: 5153 - DNA, 27 bp, Chlorociboria aeruginascens
  source 1..27: mol_type = other DNA
tgtggtcgacccggtcaaggttgcaag

SEQ ID NO: 5154 - DNA, 39 bp, Chalara longipes
  source 1..39: mol_type = other DNA
tgtggtgcacgtggacagccttgcggcaaggccaagcgc

SEQ ID NO: 5155 - DNA, 18 bp, Pseudogymnoascus sp.
  source 1..18: mol_type = other DNA; note = 03VT05
tgttggcgacctggacaa

SEQ ID NO: 5156 - DNA, 39 bp, Pseudogymnoascus sp.
  source 1..39: mol_type = other DNA; note = 05NY08
tgttggcgccctggccagccatgcggcaaagccaagcgc

SEQ ID NO: 5157 - DNA, 39 bp, Pseudogymnoascus sp.
  source 1..39: mol_type = other DNA; note = WSF 3629
tgttggcgtccaggccagccatgtggcaaagccaagcgc

SEQ ID NO: 5158 - DNA, 36 bp, Diplodia corticola
  source 1..36: mol_type = other DNA
ttctgtggtcgtatcagggggcagccctgccacaag

SEQ ID NO: 5159 - DNA, 42 bp, Diplodia corticola
  source 1..42: mol_type = other DNA
ttctgtggtcgtatcagggggcagccctgccacaagaagcgt

SEQ ID NO: 5160 - DNA, 18 bp, Glarea lozoyensis
  source 1..18: mol_type = other DNA
ttgtccatggcgctggca

SEQ ID NO: 5161 - DNA, 33 bp, Monilinia fructicola
  source 1..33: mol_type = other DNA
tttgcgacatccttgtccgggacgtccacacca

SEQ ID NO: 5162 - DNA, 33 bp, Zymoseptoria tritici
  source 1..33: mol_type = other DNA
tttggcacaaggggcgccgatggcaccgcacca

SEQ ID NO: 5163 - DNA, 33 bp, Zymoseptoria tritici; identical to SEQ ID NO: 5162
  source 1..33: mol_type = other DNA

SEQ ID NO: 5164 - DNA, 33 bp, Zymoseptoria tritici; identical to SEQ ID NO: 5162
  source 1..33: mol_type = other DNA

SEQ ID NO: 5165 - DNA, 33 bp, Zymoseptoria tritici; identical to SEQ ID NO: 5162
  source 1..33: mol_type = other DNA

SEQ ID NO: 5166 - DNA, 33 bp, Botrytis fragariae; identical to SEQ ID NO: 3626
  source 1..33: mol_type = other DNA

SEQ ID NO: 5167 - DNA, 33 bp, Botrytis fragariae; identical to SEQ ID NO: 3626
  source 1..33: mol_type = other DNA

SEQ ID NO: 5168 - DNA, 33 bp, Botrytis tulipae; identical to SEQ ID NO: 4517
  source 1..33: mol_type = other DNA

SEQ ID NO: 5169 - DNA, 33 bp, Botrytis cinerea; identical to SEQ ID NO: 4518
  source 1..33: mol_type = other DNA

SEQ ID NO: 5170 - DNA, 33 bp, Botrytis cinerea; identical to SEQ ID NO: 4518
  source 1..33: mol_type = other DNA

SEQ ID NO: 5171 - DNA, 33 bp, Botrytis cinerea; identical to SEQ ID NO: 4518
  source 1..33: mol_type = other DNA

SEQ ID NO: 5172 - DNA, 33 bp, Botrytis galanthina
  source 1..33: mol_type = other DNA
acgtttgcaaggttgtcctgggcgtccacacca

SEQ ID NO: 5173 - DNA, 33 bp, Monilinia fructigena
  source 1..33: mol_type = other DNA
acgtttgcagccttgaccggggcgtccgcacca

SEQ ID NO: 5174 - DNA, 39 bp, Botrytis cinerea
  source 1..39: mol_type = other DNA
agcctcgcgtttacatggttgcccggggcgtccgcacca

SEQ ID NO: 5175 - DNA, 39 bp, Botrytis cinerea; identical to SEQ ID NO: 5174
  source 1..39: mol_type = other DNA

SEQ ID NO: 5176 - DNA, 39 bp, Botrytis cinerea; identical to SEQ ID NO: 5174
  source 1..39: mol_type = other DNA

SEQ ID NO: 5177 - DNA, 36 bp, Botrytis cinerea
  source 1..36: mol_type = other DNA
agtacgtttacatggttgtccggggcgtccacacca

SEQ ID NO: 5178 - DNA, 36 bp, Botrytis cinerea; identical to SEQ ID NO: 5177
  source 1..36: mol_type = other DNA

SEQ ID NO: 5179 - DNA, 36 bp, Botrytis cinerea; identical to SEQ ID NO: 5177
  source 1..36: mol_type = other DNA

SEQ ID NO: 5180 - DNA, 36 bp, Botrytis fragariae
  source 1..36: mol_type = other DNA
agtacgtttgcatggttgtccgggacgtccgcacca

SEQ ID NO: 5181 - DNA, 42 bp, Pseudogymnoascus sp.
  source 1..42: mol_type = other DNA; note = VKM F-3557
atttgctggcgccccggtcagccttgtggcaaggccaagcgt

SEQ ID NO: 5182 - DNA, 42 bp, Pseudogymnoascus sp.; identical to SEQ ID NO: 5181
  source 1..42: mol_type = other DNA; note = VKM F-4516 (FW-969)

SEQ ID NO: 5183 - DNA, 42 bp, Ophiocordyceps camponoti-floridani; identical to SEQ ID NO: 4935
  source 1..42: mol_type = other DNA

SEQ ID NO: 5184 - DNA, 42 bp, Ophiocordyceps camponoti-floridani
  source 1..42: mol_type = other DNA
cctcttgaccttggagcagatggagttggggcgcgtgcacca

SEQ ID NO: 5185 - DNA, 42 bp, Ophiocordyceps camponoti-floridani; identical to SEQ ID NO: 5184
  source 1..42: mol_type = other DNA

SEQ ID NO: 5186 - DNA, 42 bp, Ophiocordyceps camponoti-floridani; identical to SEQ ID NO: 5184
  source 1..42: mol_type = other DNA

SEQ ID NO: 5187 - DNA, 42 bp, Ophiocordyceps camponoti-rufipedis
  source 1..42: mol_type = other DNA
cctcttgactttggagcagatggagttggggcgtttgcacca

SEQ ID NO: 5188 - DNA, 36 bp, Dothistroma septosporum
  source 1..36: mol_type = other DNA
cgatgcactgtccctggtcttgcttgtgggaagcgg

SEQ ID NO: 5189 - DNA, 39 bp, Metarhizium anisopliae
  source 1..39: mol_type = other DNA
ctccgcgactcggcaaggctgcccagcacgagcgcaaag

SEQ ID NO: 5190 - DNA, 30 bp, Botrytis fragariae; identical to SEQ ID NO: 4946
  source 1..30: mol_type = other DNA

SEQ ID NO: 5191 - DNA, 30 bp, Botrytis galanthina; identical to SEQ ID NO: 4952
  source 1..30: mol_type = other DNA

SEQ ID NO: 5192 - DNA, 30 bp, Botrytis tulipae; identical to SEQ ID NO: 4952
  source 1..30: mol_type = other DNA

SEQ ID NO: 5193 - DNA, 30 bp, Lindgomyces ingoldianus
  source 1..30: mol_type = other DNA
cttagagcagggctggccgacgagcctgca

SEQ ID NO: 5194 - DNA, 33 bp, Lindgomyces ingoldianus
  source 1..33: mol_type = other DNA
cttagagcagggctggccgacgagcctgcatcg

SEQ ID NO: 5195 - DNA, 33 bp, Pyricularia grisea
  source 1..33: mol_type = other DNA
cttccagcacggctggcctcggcgcgggcacca

SEQ ID NO: 5196 - DNA, 33 bp, Cryphonectria parasitica
  source 1..33: mol_type = other DNA
cttccagcagccctcaccgtggaagagacacca

SEQ ID NO: 5197 - DNA, 33 bp, Diaporthe helianthi
  source 1..33: mol_type = other DNA
cttccagcagccctcgcccttccagaaacacca

SEQ ID NO: 5198 - DNA, 33 bp, Diaporthe helianthi
  source 1..33: mol_type = other DNA
cttccagcagccctcgcccttccagaagcacca

SEQ ID NO: 5199 - DNA, 33 bp, Valsa mali
  source 1..33: mol_type = other DNA
cttccagcagccctcgcccttgaagaggcacca

SEQ ID NO: 5200 - DNA, 33 bp, Cryphonectria parasitica; identical to SEQ ID NO: 4960
  source 1..33: mol_type = other DNA

SEQ ID NO: 5201 - DNA, 33 bp, Cryphonectria parasitica
  source 1..33: mol_type = other DNA
cttccagcagccctcgccgtggaagaggcacca

SEQ ID NO: 5202 - DNA, 33 bp, Neurospora crassa; identical to SEQ ID NO: 4963
  source 1..33: mol_type = other DNA

SEQ ID NO: 5203 - DNA, 33 bp, Neurospora crassa; identical to SEQ ID NO: 4963
  source 1..33: mol_type = other DNA

SEQ ID NO: 5204 - DNA, 33 bp, Pyricularia sp.
  source 1..33: mol_type = other DNA; note = CBS 133598
cttccagcagggttggccacggcgcgggcacca

SEQ ID NO: 5205 - DNA, 30 bp, Botrytis fragariae
  source 1..30: mol_type = other DNA
cttgcatggctgtccgggacggccacacca

SEQ ID NO: 5206 - DNA, 30 bp, Botrytis cinerea
  source 1..30: mol_type = other DNA
cttgcatggctgtccgggacgtccacacca

SEQ ID NO: 5207 - DNA, 30 bp, Botrytis cinerea; identical to SEQ ID NO: 5206
  source 1..30: mol_type = other DNA

SEQ ID NO: 5208 - DNA, 30 bp, Botrytis cinerea; identical to SEQ ID NO: 5206
  source 1..30: mol_type = other DNA

SEQ ID NO: 5209 - DNA, 30 bp, Botryotinia narcissicola; identical to SEQ ID NO: 4972
  source 1..30: mol_type = other DNA

SEQ ID NO: 5210 - DNA, 30 bp, Lindgomyces ingoldianus
  source 1..30: mol_type = other DNA
cttggagcatggctgaccaacgagacggca

SEQ ID NO: 5211 - DNA, 36 bp, Lasiodiplodia theobromae
  source 1..36: mol_type = other DNA
cttgtggcagggctgaccgcggatacggccacagaa

SEQ ID NO: 5212 - DNA, 36 bp, Lasiodiplodia theobromae; identical to SEQ ID NO: 5211
  source 1..36: mol_type = other DNA

SEQ ID NO: 5213 - DNA, 36 bp, Lasiodiplodia theobromae
  source 1..36: mol_type = other DNA
cttgtggcagggctggccgcggatacgaccgcaaaa

SEQ ID NO: 5214 - DNA, 36 bp, Lasiodiplodia theobromae; identical to SEQ ID NO: 5213
  source 1..36: mol_type = other DNA

SEQ ID NO: 5215 - DNA, 27 bp, Ophiocordyceps camponoti-floridani
  source 1..27: mol_type = other DNA
gcagatggagttggggcgcttgcacca

SEQ ID NO: 5216 - DNA, 27 bp, Metarhizium anisopliae
  source 1..27: mol_type = other DNA
gcagctctggccatgcctccagcacca

SEQ ID NO: 5217 - DNA, 27 bp, Metarhizium anisopliae
  source 1..27: mol_type = other DNA
gcagctctggccatgcctccagcacca

SEQ ID NO: 5218 - DNA, 33 bp, Botryotinia narcissicola
  source 1..33: mol_type = other DNA
gcgcttacatggttgtcctgggcgtccgcacca

SEQ ID NO: 5219 - DNA, 36 bp, Colletotrichum gloeosporioides; identical to SEQ ID NO: 4605
  source 1..36: mol_type = other DNA

SEQ ID NO: 5220 - DNA, 36 bp, Pyricularia grisea
  source 1..36: mol_type = other DNA
gcgcttccagcacggctggccgcggcgagggcacca

SEQ ID NO: 5221 - DNA, 36 bp, Colletotrichum siamense; identical to SEQ ID NO: 4986
  source 1..36: mol_type = other DNA

SEQ ID NO: 5222 - DNA, 36 bp, Valsa mali
  source 1..36: mol_type = other DNA
gcgcttccagcagccctcgcccttgaagaggcacca

SEQ ID NO: 5223 - DNA, 36 bp, Pyricularia oryzae
  source 1..36: mol_type = other DNA
gcgcttccagcagggctggccgcggcgggggcacca

SEQ ID NO: 5224 - DNA, 36 bp, Colletotrichum siamense
  source 1..36: mol_type = other DNA
gcgcttccagcagggctggccgggcttggtacacca

SEQ ID NO: 5225 - DNA, 36 bp, Colletotrichum siamense; identical to SEQ ID NO: 5224
  source 1..36: mol_type = other DNA

SEQ ID NO: 5226 - DNA, 36 bp, Pyricularia sp.
  source 1..36: mol_type = other DNA; note = CBS 133598
gcgcttccagcagggttggccacggcgcgggcacca

SEQ ID NO: 5227 - DNA, 36 bp, Colletotrichum fructicola
  source 1..36: mol_type = other DNA
gcgcttccagcatggctggccgggcttggtgcacca

SEQ ID NO: 5228 - DNA, 36 bp, Colletotrichum fructicola; identical to SEQ ID NO: 5227
  source 1..36: mol_type = other DNA

SEQ ID NO: 5229 - DNA, 36 bp, Colletotrichum fructicola; identical to SEQ ID NO: 5227
  source 1..36: mol_type = other DNA

SEQ ID NO: 5230 - DNA, 39 bp, Sclerotinia sclerotiorum
  source 1..39: mol_type = other DNA
gcgcttctctttgcatggttggccggggcgtccgcacca

SEQ ID NO: 5231 - DNA, 42 bp, Pyricularia oryzae
  source 1..42: mol_type = other DNA
gcgcttgaccttccagcagggctggccgcgccgggggcacca

SEQ ID NO: 5232 - DNA, 33 bp, Monilinia fructicola
  source 1..33: mol_type = other DNA
gcgcttgcagccttggccggggcgtccgcacca

SEQ ID NO: 5233 - DNA, 33 bp, Sclerotinia sclerotiorum
  source 1..33: mol_type = other DNA
gcgcttgcatggttggcctgggcgtccgcacca

SEQ ID NO: 5234 - DNA, 42 bp, Lophiostoma macrostomum
  source 1..42: mol_type = other DNA
gcgcttggccttaccgcagggctgtccgcggtagtggcagaa

SEQ ID NO: 5235 - DNA, 42 bp, Neurospora crassa
  source 1..42: mol_type = other DNA
gcgcttggccttccagcaggactggccgtggatgcggcacca

SEQ ID NO: 5236 - DNA, 42 bp, Neurospora crassa; identical to SEQ ID NO: 5235
  source 1..42: mol_type = other DNA

SEQ ID NO: 5237 - DNA, 42 bp, Neofusicoccum parvum
  source 1..42: mol_type = other DNA
gcgcttggccttggagcacggctgtcccttccagcggcacca

SEQ ID NO: 5238 - DNA, 42 bp, Stachybotrys chlorohalonata
  source 1..42: mol_type = other DNA
gcgcttggctttccagcacggctggccggggcgtgtgcacca

SEQ ID NO: 5239 - DNA, 39 bp, Pseudogymnoascus sp.
  source 1..39: mol_type = other DNA; note = VKM F-4514 (FW-929)
gcgcttggcttttccgcatggctggcctggacgccagca

SEQ ID NO: 5240 - DNA, 42 bp, Pseudogymnoascus sp.
  source 1..42: mol_type = other DNA; note = VKM F-4514 (FW-929)
gcgcttggcttttccgcatggctggcctggacgccagcagat

SEQ ID NO: 5241 - DNA, 39 bp, Lophium mytilinum
  source 1..39: mol_type = other DNA
gcgcttgtctttgctgcaagactggcctgggagatgaca

SEQ ID NO: 5242 - DNA, 39 bp, Lophium mytilinum
  source 1..39: mol_type = other DNA
gcgcttttccttggagcaagattggccggggagatggca

SEQ ID NO: 5243 - DNA, 36 bp, Colletotrichum siamense
  source 1..36: mol_type = other DNA
gcgtttccagcagggctggccgggcttggtgcacca

SEQ ID NO: 5244 - DNA, 33 bp, Rutstroemia sp.
  source 1..33: mol_type = other DNA; note = NJR-2017a WRK4
gcgtttgcagggttggccggggcggccgcacca

SEQ ID NO: 5245 - DNA, 42 bp, Mytilinidion resinicola
  source 1..42: mol_type = other DNA
tactgccatctgcccggccagtcttgcagcaaggacaaacgc

SEQ ID NO: 5246 - DNA, 42 bp, Trichoderma asperellum
  source 1..42: mol_type = other DNA
tcgcttagccttccagcaagactcgccgacgcgccagcacca

SEQ ID NO: 5247 - DNA, 42 bp, Trichoderma asperellum
  source 1..42: mol_type = other DNA
tcgcttggccttccagcaagactcgccgacgcgccagcacca

SEQ ID NO: 5248 - DNA, 42 bp, Trichoderma gamsii
  source 1..42: mol_type = other DNA
tcgcttggccttccagcaagactcgccgactctccagcacca

SEQ ID NO: 5249 - DNA, 42 bp, Trichoderma atroviride
  source 1..42: mol_type = other DNA
tcgcttggccttccagcacgactcgccgactctccagcacca

SEQ ID NO: 5250 - DNA, 42 bp, Metarhizium anisopliae
  source 1..42: mol_type = other DNA
tcgtcgatcatgaacacatggcagacctgagctggcgaccca

SEQ ID NO: 5251 - DNA, 33 bp, Venustampulla echinocandica
  source 1..33: mol_type = other DNA
tctcttccagcagccttgtccaacgtgggtgca

SEQ ID NO: 5252 - DNA, 30 bp, Sodiomyces alkalinus
  source 1..30: mol_type = other DNA
tgcaccaagcccggtcaaccgtgctggaag

SEQ ID NO: 5253 - DNA, 30 bp, Sodiomyces alkalinus
  source 1..30: mol_type = other DNA
tgcaccaagcctggccagccatgctggaag

SEQ ID NO: 5254 - DNA, 33 bp, Dothistroma septosporum
  source 1..33: mol_type = other DNA
tgcaccgtccctggtcttgcttgcggcaagcgg

SEQ ID NO: 5255 - DNA, 39 bp, Mytilinidion resinicola
  source 1..39: mol_type = other DNA
tgccatctccccggccagtcttgcagcaaggacaaacgc

SEQ ID NO: 5256 - DNA, 39 bp, Diplocarpon rosae
  source 1..39: mol_type = other DNA
tgcggacaccccggtcagccatgtggaaaggccaagcgt

SEQ ID NO: 5257 - DNA, 39 bp, Diplocarpon rosae; identical to SEQ ID NO: 5256
  source 1..39: mol_type = other DNA

SEQ ID NO: 5258 - DNA, 39 bp, Pseudogymnoascus sp.
  source 1..39: mol_type = other DNA; note = VKM F-3557
tgctggcgtcccggtcagccatgcggtaaagccaagcgt

SEQ ID NO: 5259 - DNA, 39 bp, Pseudogymnoascus sp.; identical to SEQ ID NO: 5258
  source 1..39: mol_type = other DNA; note = VKM F-4516 (FW-969)

SEQ ID NO: 5260 - DNA, 27 bp, Aspergillus fumigatiaffinis
  source 1..27: mol_type = other DNA
tggacacatgcgagtgggcaaggatcg

SEQ ID NO: 5261 - DNA, 36 bp, Aspergillus fumigatiaffinis; identical to SEQ ID NO: 5054
  source 1..36: mol_type = other DNA

SEQ ID NO: 5262 - DNA, 39 bp, Aspergillus lentulus
  source 1..39: mol_type = other DNA
tggcaacatctcttccagaaagggtgtcaacctgcccgg

SEQ ID NO: 5263 - DNA, 39 bp, Aspergillus lentulus; identical to SEQ ID NO: 5262
  source 1..39: mol_type = other DNA

SEQ ID NO: 5264 - DNA, 33 bp, Purpureocillium lilacinum
  source 1..33: mol_type = other DNA
tggtgcaaccgtcccggacagccctgcaagagg

SEQ ID NO: 5265 - DNA, 33 bp, Purpureocillium lilacinum; identical to SEQ ID NO: 5264
  source 1..33: mol_type = other DNA

SEQ ID NO: 5266 - DNA, 33 bp, Purpureocillium lilacinum
  source 1..33: mol_type = other DNA
tggtgcaaccgtcccggacagccgtgcaagagg

SEQ ID NO: 5267 - DNA, 36 bp, Colletotrichum tropicale; identical to SEQ ID NO: 4749
  source 1..36: mol_type = other DNA

SEQ ID NO: 5268 - DNA, 36 bp, Colletotrichum aenigma; identical to SEQ ID NO: 4749
  source 1..36: mol_type = other DNA

SEQ ID NO: 5269 - DNA, 36 bp, Colletotrichum fructicola
  source 1..36: mol_type = other DNA
tggtgcactaagcccggacagccatgctggaagcgt

SEQ ID NO: 5270 - DNA, 36 bp, Colletotrichum fructicola; identical to SEQ ID NO: 5269
  source 1..36: mol_type = other DNA

SEQ ID NO: 5271 - DNA, 36 bp, Colletotrichum fructicola; identical to SEQ ID NO: 5269
  source 1..36: mol_type = other DNA

SEQ ID NO: 5272 - DNA, 36 bp, Colletotrichum fructicola; identical to SEQ ID NO: 5269
  source 1..36: mol_type = other DNA

SEQ ID NO: 5273 - DNA, 36 bp, Colletotrichum siamense
  source 1..36: mol_type = other DNA
tggtgcactaagcccggccagccctgctggaagcgc

SEQ ID NO: 5274 - DNA, 36 bp, Madurella mycetomatis
  source 1..36: mol_type = other DNA
tggtgcactggcttccctggccagccgtgttggaag

SEQ ID NO: 5275 - DNA, 36 bp, Madurella mycetomatis; identical to SEQ ID NO: 5274
  source 1..36: mol_type = other DNA

SEQ ID NO: 5276 - DNA, 33 bp, Pyricularia oryzae
  source 1..33: mol_type = other DNA
tggtgcccgcgtcgcggccagccctgctggaag

SEQ ID NO: 5277 - DNA, 33 bp, Pyricularia oryzae; identical to SEQ ID NO: 5276
  source 1..33: mol_type = other DNA

SEQ ID NO: 5278 - DNA, 33 bp, Pyricularia oryzae; identical to SEQ ID NO: 5276
  source 1..33: mol_type = other DNA

SEQ ID NO: 5279 - DNA, 36 bp, Pyricularia oryzae
  source 1..36: mol_type = other DNA
tggtgcccgcgtcgcggccagccctgctggaagcgg

SEQ ID NO: 5280 - DNA, 36 bp, Pyricularia oryzae; identical to SEQ ID NO: 5279
  source 1..36: mol_type = other DNA

SEQ ID NO: 5281 - DNA, 36 bp, Pyricularia oryzae; identical to SEQ ID NO: 5279
  source 1..36: mol_type = other DNA

SEQ ID NO: 5282 - DNA, 33 bp, Neurospora tetrasperma
  source 1..33: mol_type = other DNA
tggtgccgcatccacggccagtcgtgctggaag

SEQ ID NO: 5283 - DNA, 33 bp, Neurospora tetrasperma; identical to SEQ ID NO: 5098
  source 1..33: mol_type = other DNA

SEQ ID NO: 5284 - DNA, 42 bp, Neurospora tetrasperma
  source 1..42: mol_type = other DNA
tggtgccggatccatggccagtcctgctggaaggtcaagcgt

SEQ ID NO: 5285 - DNA, 36 bp, Cytospora leucostoma
  source 1..36: mol_type = other DNA
tggtgcctgctcaagggccaagggtgctggaagcgc

SEQ ID NO: 5286 - DNA, 33 bp, Valsa sordida
  source 1..33: mol_type = other DNA
tggtgcctgctcaagggccaggggtgctggaag

SEQ ID NO: 5287 - DNA, 36 bp, Valsa sordida
  source 1..36: mol_type = other DNA
tggtgcctgctcaagggccaggggtgctggaagcgg

SEQ ID NO: 5288 - DNA, 33 bp, Valsa mali
  source 1..33: mol_type = other DNA
tggtgcctgttcaagggtgaagggtgctggaag

SEQ ID NO: 5289 - DNA, 36 bp, Valsa mali
  source 1..36: mol_type = other DNA
tggtgcctgttcaagggtgaagggtgctggaagcgt

SEQ ID NO: 5290 - DNA, 33 bp, Coniella lustricola; identical to SEQ ID NO: 5113
  source 1..33: mol_type = other DNA

SEQ ID NO: 5291 - DNA, 36 bp, Coniella lustricola
  source 1..36: mol_type = other DNA
tggtgcctgtttcacggcgagggctgctggaagcgc

SEQ ID NO: 5292 - DNA, 33 bp, Coniella lustricola
  source 1..33: mol_type = other DNA
tggtgccttttccacggcgagggctgctggaag

SEQ ID NO: 5293 - DNA, 33 bp, Botrytis elliptica; identical to SEQ ID NO: 5116
  source 1..33: mol_type = other DNA

SEQ ID NO: 5294 - DNA, 30 bp, Botryotinia convoluta; identical to SEQ ID NO: 939
  source 1..30: mol_type = other DNA

SEQ ID NO: 5295 - DNA, 33 bp, Botryotinia convoluta; identical to SEQ ID NO: 4832
  source 1..33: mol_type = other DNA

SEQ ID NO: 5296 - DNA, 33 bp, Monilinia laxa
  source 1..33: mol_type = other DNA
tggtgcggacgccctggtcaaggatgcaagcgt

SEQ ID NO: 5297 - DNA, 27 bp, Botrytis hyacinthi
  source 1..27: mol_type = other DNA
tggtgcggacgtcccggacaaccatgc

SEQ ID NO: 5298 - DNA, 30 bp, Sclerotinia sclerotiorum; identical to SEQ ID NO: 938
  source 1..30: mol_type = other DNA

SEQ ID NO: 5299 - DNA, 30 bp, Botrytis hyacinthi; identical to SEQ ID NO: 938
  source 1..30: mol_type = other DNA

SEQ ID NO: 5300 - DNA, 30 bp, Botrytis paeoniae; identical to SEQ ID NO: 938
  source 1..30: mol_type = other DNA

SEQ ID NO: 5301 - DNA, 33 bp, Sclerotinia sclerotiorum
  source 1..33: mol_type = other DNA
tggtgcggacgtcccggacaaccatgcaaacgt

SEQ ID NO: 5302 - DNA, 33 bp, Botrytis hyacinthi; identical to SEQ ID NO: 5301
  source 1..33: mol_type = other DNA

SEQ ID NO: 5303 - DNA, 33 bp, Botrytis paeoniae; identical to SEQ ID NO: 5301
  source 1..33: mol_type = other DNA

SEQ ID NO: 5304 - DNA, 33 bp, Sclerotinia borealis
  source 1..33: mol_type = other DNA
tggtgcggacgtcccggacaaccctgcaagcgt

SEQ ID NO: 5305 - DNA, 30 bp, Rutstroemia sp.
  source 1..30: mol_type = other DNA; note = NJR-2017a BVV2
tggtgcggccgccccggccagccttgcaaa

SEQ ID NO: 5306 - DNA, 39 bp, Rutstroemia sp.
  source 1..39: mol_type = other DNA; note = NJR-2017a BVV2
tggtgcggccgccccggccagccttgcaaagagaagcgc

SEQ ID NO: 5307 - DNA, 33 bp, Rutstroemia sp.
  source 1..33: mol_type = other DNA; note = NJR-2017a BBW
tggtgcggccgccccggtcaaccctgcaaacgc

SEQ ID NO: 5308 - DNA, 30 bp, Rutstroemia sp.; identical to SEQ ID NO: 751
  source 1..30: mol_type = other DNA; note = NJR-2017a BBW

SEQ ID NO: 5309 - DNA, 39 bp, Zymoseptoria brevis
  source 1..39: mol_type = other DNA
tggtgcggtgccattggtgcaccttgcgccaagcgcgac

SEQ ID NO: 5310 - DNA, 42 bp, Trichoderma gamsii
  source 1..42: mol_type = other DNA
tggtgctggcgtgtcggcgagtcctgctggaaggccaagcgt

SEQ ID NO: 5311 - DNA, 33 bp, Diaporthe ampelina; identical to SEQ ID NO: 5138
  source 1..33: mol_type = other DNA

SEQ ID NO: 5312 - DNA, 36 bp, Diaporthe ampelina
  source 1..36: mol_type = other DNA
tggtgcttctggaagggccagggctgctggaagcgc

SEQ ID NO: 5313 - DNA, 39 bp, Chaetomium thermophilum
  source 1..39: mol_type = other DNA
tggtgtacccgcttcccgggccagccttgctggaagcgt

SEQ ID NO: 5314 - DNA, 33 bp, Pyricularia pennisetigena
  source 1..33: mol_type = other DNA
tggtgtccgcgccgaggccagccgtgctggaag

SEQ ID NO: 5315 - DNA, 36 bp, Pyricularia pennisetigena
  source 1..36: mol_type = other DNA
tggtgtccgcgccgaggccagccgtgctggaagcgc

SEQ ID NO: 5316 - DNA, 42 bp, Sordaria macrospora
  source 1..42: mol_type = other DNA
tggtgtcggatccatggccagtcctgctggaaggtcaagcgt

SEQ ID NO: 5317 - DNA, 42 bp, Sordaria macrospora; identical to SEQ ID NO: 5316
  source 1..42: mol_type = other DNA

SEQ ID NO: 5318 - DNA, 36 bp, Valsa malicola
  source 1..36: mol_type = other DNA
tggtgtctcctcaagggccagggctgctggaagcgc

SEQ ID NO: 5319 - DNA, 30 bp, Botryotinia calthae
  source 1..30: mol_type = other DNA
tggtgtggacgcccaggacaaccctgcaaa

SEQ ID NO: 5320 - DNA, 33 bp, Botryotinia calthae
  source 1..33: mol_type = other DNA
tggtgtggacgcccaggacaaccctgcaaacgt

SEQ ID NO: 5321 - DNA, 33 bp, Botryotinia calthae
  source 1..33: mol_type = other DNA
tggtgtggacgccccggacaaccatgcaaacgt

SEQ ID NO: 5322 - DNA, 30 bp, Sclerotinia borealis; identical to SEQ ID NO: 451
  source 1..30: mol_type = other DNA

SEQ ID NO: 5323 - DNA, 36 bp, Polyplosphaeria fusca
  source 1..36: mol_type = other DNA
tgtcgcttcccaggctcattctgtggcaagaagaga

SEQ ID NO: 5324 - DNA, 30 bp, Cadophora sp.
  source 1..30: mol_type = other DNA; note = DSE1049
tgtggacaccctggccaaccttgcggaaag

SEQ ID NO: 5325 - DNA, 33 bp, Cadophora sp.
  source 1..33: mol_type = other DNA; note = DSE1049
tgtggacaccctggccaaccttgcggaaagcgt

SEQ ID NO: 5326 - DNA, 39 bp, Hyaloscypha bicolor
  source 1..39: mol_type = other DNA
tgtggagctcgcggacaaccctgtggcaaggccaagcgt

SEQ ID NO: 5327 - DNA, 30 bp, Drepanopeziza brunnea
  source 1..30: mol_type = other DNA
tgtggctaccgcggacagccttgccccaag

SEQ ID NO: 5328 - DNA, 39 bp, Amorphotheca resinae
  source 1..39: mol_type = other DNA
tgtggtaaggttggacagccctgtggcaaggccaagcgt

SEQ ID NO: 5329 - DNA, 39 bp, Chalara longipes
  source 1..39: mol_type = other DNA
tgtggtgcgagaggtcaaccctgtggaaaggctaagcgt

SEQ ID NO: 5330 - DNA, 18 bp, Pseudogymnoascus sp.
  source 1..18: mol_type = other DNA; note = 03VT05
tgttggcgacctggacaa

SEQ ID NO: 5331 - DNA, 39 bp, Pseudogymnoascus sp.
  source 1..39: mol_type = other DNA; note = 03VT05
tgttggcgtccaggccagccgtgcggtaaagccaagcgc

SEQ ID NO: 5332 - DNA, 36 bp, Helotiales sp.
  source 1..36: mol_type = other DNA; note = DMI_Dod_QoI
tttgactttgccgcatggttgacctggataaccgca

SEQ ID NO: 5333 - DNA, 30 bp, Rutstroemia sp.
  source 1..30: mol_type = other DNA; note = NJR-2017a WRK4
tttgcagggttgcccgggacggccgcacca

SEQ ID NO: 5334 - DNA, 33 bp, Zymoseptoria tritici
  source 1..33: mol_type = other DNA
tttggcgcatggggcaccgatggcaccgcacca

SEQ ID NO: 5335 - DNA, 33 bp, Zymoseptoria tritici; identical to SEQ ID NO: 5334
  source 1..33: mol_type = other DNA

SEQ ID NO: 5336 - DNA, 33 bp, Zymoseptoria tritici; identical to SEQ ID NO: 5334
  source 1..33: mol_type = other DNA

SEQ ID NO: 5337 - DNA, 33 bp, Zymoseptoria tritici; identical to SEQ ID NO: 5334
  source 1..33: mol_type = other DNA

SEQ ID NO: 5338 - DNA, 36 bp, Diplodia corticola
  source 1..36: mol_type = other DNA
ttttgtggtcgtatcaggggccagccttgccacaag

SEQ ID NO: 5339 - DNA, 42 bp, Diplodia corticola
  source 1..42: mol_type = other DNA
ttttgtggtcgtatcaggggccagccttgccacaagaagcgc

SEQ ID NO: 5340 - DNA, 30 bp, Botrytis fragariae; identical to SEQ ID NO: 4516
  source 1..30: mol_type = other DNA

SEQ ID NO: 5341 - DNA, 33 bp, Botrytis fragariae
  source 1..33: mol_type = other DNA
acgtttacatggttgcccggggcgtccgcacca

SEQ ID NO: 5342 - DNA, 33 bp, Botrytis tulipae; identical to SEQ ID NO: 5172
  source 1..33: mol_type = other DNA

SEQ ID NO: 5343 - DNA, 33 bp, Botrytis cinerea; identical to SEQ ID NO: 4522
  source 1..33: mol_type = other DNA

SEQ ID NO: 5344 - DNA, 33 bp, Botrytis cinerea; identical to SEQ ID NO: 4522
  source 1..33: mol_type = other DNA

SEQ ID NO: 5345 - DNA, 33 bp, Botrytis cinerea; identical to SEQ ID NO: 4522
  source 1..33: mol_type = other DNA

SEQ ID NO: 5346 - DNA, 33 bp, Botrytis galanthina; identical to SEQ ID NO: 4914
  source 1..33: mol_type = other DNA

SEQ ID NO: 5347 - DNA, 39 bp, Botrytis cinerea
  source 1..39: mol_type = other DNA
agcttcgcgcttgcatggttgaccggggcgtccgcacca

SEQ ID NO: 5348 - DNA, 39 bp, Botrytis cinerea; identical to SEQ ID NO: 5347
  source 1..39: mol_type = other DNA

SEQ ID NO: 5349 - DNA, 39 bp, Botrytis cinerea; identical to SEQ ID NO: 5347
  source 1..39: mol_type = other DNA

SEQ ID NO: 5350 - DNA, 36 bp, Botrytis fragariae
  source 1..36: mol_type = other DNA
atcacgcttacatggttgaccgggacgtccacacca

SEQ ID NO: 5351 - DNA, 42 bp, Ophiocordyceps camponoti-floridani; identical to SEQ ID NO: 5184
  source 1..42: mol_type = other DNA

SEQ ID NO: 5352 - DNA, 42 bp, Ophiocordyceps camponoti-floridani
  source 1..42: mol_type = other DNA
cctcttgaccttggagcagatggagttgggtcgcgtgcacca

SEQ ID NO: 5353 - DNA, 42 bp, Ophiocordyceps camponoti-floridani; identical to SEQ ID NO: 5352
  source 1..42: mol_type = other DNA

SEQ ID NO: 5354 - DNA, 42 bp, Ophiocordyceps camponoti-floridani; identical to SEQ ID NO: 5352
  source 1..42: mol_type = other DNA

SEQ ID NO: 5355 - DNA, 33 bp, Monilinia fructigena; identical to SEQ ID NO: 4939
  source 1..33: mol_type = other DNA

SEQ ID NO: 5356 - DNA, 36 bp, Dothistroma septosporum
  source 1..36: mol_type = other DNA
cgatgcactgttccaggtcttgcatgcggaaagcgt

SEQ ID NO: 5357 - DNA, 33 bp, Diaporthe helianthi; identical to SEQ ID NO: 5198
  source 1..33: mol_type = other DNA

SEQ ID NO: 5358 - DNA, 33 bp, Cryphonectria parasitica
  source 1..33: mol_type = other DNA
cttccagcagccctcgccgtggaagagacacca

SEQ ID NO: 5359 - DNA, 33 bp, Cryphonectria parasitica; identical to SEQ ID NO: 5201
  source 1..33: mol_type = other DNA

SEQ ID NO: 5360 - DNA, 33 bp, Cryphonectria parasitica
  source 1..33: mol_type = other DNA
cttccagcagccttctccgtggaagaggcacca

SEQ ID NO: 5361 - DNA, 33 bp, Valsa mali
  source 1..33: mol_type = other DNA
cttccagcatccctcgcccttgaacaggcacca

SEQ ID NO: 5362 - DNA, 30 bp, Botrytis tulipae
  source 1..30: mol_type = other DNA
cttgcatggctgaccggggcgtccgcacca

SEQ ID NO: 5363 - DNA, 30 bp, Botrytis fragariae; identical to SEQ ID NO: 5205
  source 1..30: mol_type = other DNA

SEQ ID NO: 5364 - DNA, 30 bp, Botrytis cinerea
  source 1..30: mol_type = other DNA
cttgcatggctgtccggggcgtccgcacca

SEQ ID NO: 5365 - DNA, 30 bp, Botrytis cinerea; identical to SEQ ID NO: 5364
  source 1..30: mol_type = other DNA

SEQ ID NO: 5366 - DNA, 30 bp, Botrytis cinerea; identical to SEQ ID NO: 5364
  source 1..30: mol_type = other DNA

SEQ ID NO: 5367 - DNA, 30 bp, Botrytis fragariae
  source 1..30: mol_type = other DNA
cttgcatggttgaccagggcgtccgcacca

SEQ ID NO: 5368 - DNA, 30 bp, Botrytis galanthina; identical to SEQ ID NO: 4972
  source 1..30: mol_type = other DNA

SEQ ID NO: 5369 - DNA, 30 bp, Botrytis cinerea; identical to SEQ ID NO: 4972
  source 1..30: mol_type = other DNA

SEQ ID NO: 5370 - DNA, 30 bp, Botrytis cinerea; identical to SEQ ID NO: 4972
  source 1..30: mol_type = other DNA

SEQ ID NO: 5371 - DNA, 30 bp, Botrytis cinerea; identical to SEQ ID NO: 4972
  source 1..30: mol_type = other DNA

SEQ ID NO: 5372 - DNA, 30 bp, Botryotinia narcissicola
  source 1..30: mol_type = other DNA
cttgcatggttgtccgggacgtccacacca

SEQ ID NO: 5373 - DNA, 36 bp, Colletotrichum gloeosporioides
  source 1..36: mol_type = other DNA
gcgcttccagcacggttggccaggcttggtgcacca

SEQ ID NO: 5374 - DNA, 36 bp, Diaporthe helianthi
  source 1..36: mol_type = other DNA
gcgcttccagcagccctcgcccttccagaaacacca

SEQ ID NO: 5375 - DNA, 36 bp, Valsa mali
  source 1..36: mol_type = other DNA
gcgcttccagcatccctcgcccttgaacaggcacca

SEQ ID NO: 5376 - DNA, 42 bp, Ophiocordyceps camponoti-rufipedis
  source 1..42: mol_type = other DNA
gcgcttgaccttggagcagatggagttgggacgcttgcacca

SEQ ID NO: 5377 - DNA, 33 bp, Monilinia fructicola
  source 1..33: mol_type = other DNA
gcgcttgcatccttgtccgggacgtccacacca

SEQ ID NO: 5378 - DNA, 33 bp, Botryotinia narcissicola
  source 1..33: mol_type = other DNA
gcgcttgcatggttgaccggggcgtccgcacca

SEQ ID NO: 5379 - DNA, 42 bp, Lophiostoma macrostomum
  source 1..42: mol_type = other DNA
gcgcttggcctttccacagggctggccgcggtagtggcagaa

SEQ ID NO: 5380 - DNA, 39 bp, Lophium mytilinum
  source 1..39: mol_type = other DNA
gcgcttttctttggagcaagattggcctgggagatggca

SEQ ID NO: 5381 - DNA, 36 bp, Colletotrichum siamense
  source 1..36: mol_type = other DNA
gcgtttccagcagggctggccaggtttggtgcacca

SEQ ID NO: 5382 - DNA, 36 bp, Colletotrichum siamense; identical to SEQ ID NO: 5381
  source 1..36: mol_type = other DNA

SEQ ID NO: 5383 - DNA, 36 bp, Colletotrichum siamense; identical to SEQ ID NO: 5243
  source 1..36: mol_type = other DNA

SEQ ID NO: 5384 - DNA, 33 bp, Sclerotinia sclerotiorum
  source 1..33: mol_type = other DNA
gcgtttgcatggttgtccgggacgtccacacca

SEQ ID NO: 5385 - DNA, 42 bp, Lasiodiplodia theobromae
  source 1..42: mol_type = other DNA
gcgttttttgtggcaaggctgtccacggatgcggccacagaa

SEQ ID NO: 5386 - DNA, 42 bp, Lasiodiplodia theobromae; identical to SEQ ID NO: 5385
  source 1..42: mol_type = other DNA

SEQ ID NO: 5387 - DNA, 42 bp, Ophiocordyceps camponoti-floridani
  source 1..42: mol_type = other DNA
ggacctcttggggccgcactgcgagttgggacggtagcacca

SEQ ID NO: 5388 - DNA, 27 bp, Lophium mytilinum
  source 1..27: mol_type = other DNA
ggagcaagattgaccggggagatggca

SEQ ID NO: 5389 - DNA, 42 bp, Mytilinidion resinicola
  source 1..42: mol_type = other DNA
tactgccatcttcctggtcaatcttgcagcaaggacaagcgc

SEQ ID NO: 5390 - DNA, 33 bp, Rutstroemia sp.
  source 1..33: mol_type = other DNA; note = NJR-2017a WRK4
tcgcttgcaaggctgtccgggacgaccgcacca

SEQ ID NO: 5391 - DNA, 33 bp, Venustampulla echinocandica
  source 1..33: mol_type = other DNA
tctcttccagcagccttgtccgacgtgggtgca

SEQ ID NO: 5392 - DNA, 42 bp, Metarhizium anisopliae; identical to SEQ ID NO: 3973
  source 1..42: mol_type = other DNA

SEQ ID NO: 5393 - DNA, 42 bp, Metarhizium anisopliae; identical to SEQ ID NO: 3973
  source 1..42: mol_type = other DNA

SEQ ID NO: 5394 - DNA, 42 bp, Metarhizium anisopliae; identical to SEQ ID NO: 3973
  source 1..42: mol_type = other DNA

SEQ ID NO: 5395 - DNA, 42 bp, Metarhizium anisopliae; identical to SEQ ID NO: 3973
  source 1..42: mol_type = other DNA

SEQ ID NO: 5396 - DNA, 33 bp, Sodiomyces alkalinus
  source 1..33: mol_type = other DNA
tgcaccaagcctggccagccatgctggaagcgt

SEQ ID NO: 5397 - DNA, 33 bp, Dothistroma septosporum
  source 1..33: mol_type = other DNA
tgcaccgtgccaggtcttgcatgtggcaagcgt

SEQ ID NO: 5398 - DNA, 39 bp, Mytilinidion resinicola
  source 1..39: mol_type = other DNA
tgccatctgcccggccagtcttgcagcaaggacaaacgc

SEQ ID NO: 5399 - DNA, 39 bp, Diplocarpon rosae
  source 1..39: mol_type = other DNA
tgcggacaccccggtcagccatgtggaaaggcgaagcgt

SEQ ID NO: 5400 - DNA, 39 bp, Diplocarpon rosae
  source 1..39: mol_type = other DNA
tgcggtcaccctggtcagccatgtggaaaggcgaagcgt

SEQ ID NO: 5401 - DNA, 39 bp, Aspergillus fumigatiaffinis; identical to SEQ ID NO: 5262
  source 1..39: mol_type = other DNA

SEQ ID NO: 5402 - DNA, 36 bp, Colletotrichum tropicale; identical to SEQ ID NO: 5067
  source 1..36: mol_type = other DNA

SEQ ID NO: 5403 - DNA, 36 bp, Colletotrichum aenigma; identical to SEQ ID NO: 5067
  source 1..36: mol_type = other DNA

SEQ ID NO: 5404 - DNA, 33 bp, Neurospora tetrasperma
  source 1..33: mol_type = other DNA
tggtgccgcattcacggtcagtcctgctggaag

SEQ ID NO: 5405 - DNA, 36 bp, Cytospora leucostoma
  source 1..36: mol_type = other DNA
tggtgcctgctcaagggccaggggtgctggaagcgc

SEQ ID NO: 5406 - DNA, 33 bp, Valsa mali
  source 1..33: mol_type = other DNA
tggtgcctgttcaagggtgagggctgctggaag

SEQ ID NO: 5407 - DNA, 36 bp, Valsa mali
  source 1..36: mol_type = other DNA
tggtgcctgttcaagggtgagggctgctggaagcgg

SEQ ID NO: 5408 - DNA, 33 bp, Valsa sordida
  source 1..33: mol_type = other DNA
tggtgcctgttgaagggccagggctgctggaag

SEQ ID NO: 5409 - DNA, 42 bp, Valsa sordida
  source 1..42: mol_type = other DNA
tggtgcctgttgaagggccagggctgctggaaggtcaagcgt

SEQ ID NO: 5410 - DNA, 33 bp, Coniella lustricola; identical to SEQ ID NO: 5292
  source 1..33: mol_type = other DNA

SEQ ID NO: 5411 - DNA, 36 bp, Coniella lustricola
  source 1..36: mol_type = other DNA
tggtgccttttccacggcgagggctgctggaagcgc

SEQ ID NO: 5412 - DNA, 33 bp, Botrytis elliptica; identical to SEQ ID NO: 4832
  source 1..33: mol_type = other DNA

SEQ ID NO: 5413 - DNA, 30 bp, Botryotinia convoluta; identical to SEQ ID NO: 938
  source 1..30: mol_type = other DNA

SEQ ID NO: 5414 - DNA, 33 bp, Botryotinia convoluta; identical to SEQ ID NO: 5301
  source 1..33: mol_type = other DNA

SEQ ID NO: 5415 - DNA, 30 bp, Botrytis hyacinthi; identical to SEQ ID NO: 5126
  source 1..30: mol_type = other DNA

SEQ ID NO: 5416 - DNA, 33 bp, Botrytis hyacinthi
  source 1..33: mol_type = other DNA
tggtgcggacgtcccggacaaccatgcaagcgc

SEQ ID NO: 5417 - DNA, 33 bp, Monilinia laxa
  source 1..33: mol_type = other DNA
tggtgcggacgtcccggacaaggatgcaagaga

SEQ ID NO: 5418 - DNA, 30 bp, Sclerotinia sclerotiorum
  source 1..30: mol_type = other DNA
tggtgcggacgtcccggtcaaccatgcaag

SEQ ID NO: 5419 - DNA, 33 bp, Sclerotinia sclerotiorum
  source 1..33: mol_type = other DNA
tggtgcggacgtcccggtcaaccatgcaagcgt

SEQ ID NO: 5420 - DNA, 30 bp, Botrytis paeoniae
  source 1..30: mol_type = other DNA
tggtgcggacgtcccggtcaaccatgtaag

SEQ ID NO: 5421 - DNA, 33 bp, Botrytis paeoniae
  source 1..33: mol_type = other DNA
tggtgcggacgtcccggtcaaccatgtaagcgt

SEQ ID NO: 5422 - DNA, 30 bp, Rutstroemia sp.
  source 1..30: mol_type = other DNA; note = NJR-2017a BVV2
tggtgcggccgtcccggacaaccctgcaaa

SEQ ID NO: 5423 - DNA, 33 bp, Rutstroemia sp.
  source 1..33: mol_type = other DNA; note = NJR-2017a BVV2
tggtgcggccgtcccggacaaccctgcaaacgc

SEQ ID NO: 5424 - DNA, 33 bp, Rutstroemia sp.
  source 1..33: mol_type = other DNA; note = NJR-2017a BBW
tggtgcggccgtcccggacaaccgtgcaagcgg

SEQ ID NO: 5425 - DNA, 30 bp, Rutstroemia sp.
  source 1..30: mol_type = other DNA; note = NJR-2017a BBW
tggtgcggccgtcccggccaaccctgcaaa

SEQ ID NO: 5426 - DNA, 27 bp, Botrytis hyacinthi
  source 1..27: mol_type = other DNA
tggtgcgggcgcccaggacaaccatgc

SEQ ID NO: 5427 - DNA, 42 bp, Diaporthe ampelina
  source 1..42: mol_type = other DNA
tggtgcttctggaagggccagggctgctggaaggccaagcgc

SEQ ID NO: 5428 - DNA, 36 bp, Diaporthe ampelina
  source 1..36: mol_type = other DNA
tggtgcttctggaagggccaggggtgctggaagcgc

SEQ ID NO: 5429 - DNA, 33 bp, Coniella lustricola
  source 1..33: mol_type = other DNA
tggtgcttgttccacggtgagggatgctggaag

SEQ ID NO: 5430 - DNA, 36 bp, Colletotrichum siamense
  source 1..36: mol_type = other DNA
tggtgtaccaagcccggacagccatgctggaagcgt

SEQ ID NO: 5431 - DNA, 30 bp, Botryotinia calthae
  source 1..30: mol_type = other DNA
tggtgtggacgccccggacaaccatgcaaa

SEQ ID NO: 5432 - DNA, 33 bp, Botryotinia calthae; identical to SEQ ID NO: 5321
  source 1..33: mol_type = other DNA

SEQ ID NO: 5433 - DNA, 33 bp, Sclerotinia borealis
  source 1..33: mol_type = other DNA
tggtgtggacgccctggacaaccttgcaagaga

SEQ ID NO: 5434 - DNA, 18 bp, Aspergillus fumigatiaffinis
  source 1..18: mol_type = other DNA
tggtgtttgatacccggt

SEQ ID NO: 5435 - DNA, 30 bp, Cadophora sp.
  source 1..30: mol_type = other DNA; note = DSE1049
tgtggacatcccggacaaccttgcggcaag

SEQ ID NO: 5436 - DNA, 33 bp, Cadophora sp.
  source 1..33: mol_type = other DNA; note = DSE1049
tgtggacatcccggacaaccttgcggcaagcgt

SEQ ID NO: 5437 - DNA, 39 bp, Hyaloscypha bicolor
  source 1..39: mol_type = other DNA
tgtggagctcgcggacagccctgtggcaaggccaagcgt

SEQ ID NO: 5438 - DNA, 30 bp, Rutstroemia sp.
  source 1..30: mol_type = other DNA; note = NJR-2017a WRK4
tttgcagggttggccggggcggccgcacca

SEQ ID NO: 5439 - DNA, 30 bp, Sclerotinia sclerotiorum
  source 1..30: mol_type = other DNA
tttgcagggttgtccggggcgtccgcacca

SEQ ID NO: 5440 - DNA, 36 bp, Lasiodiplodia theobromae
  source 1..36: mol_type = other DNA
tttgtggcaaggctgtccacggatgcggccacagaa

SEQ ID NO: 5441 - DNA, 36 bp, Lasiodiplodia theobromae; identical to SEQ ID NO: 5440
  source 1..36: mol_type = other DNA

SEQ ID NO: 5442 - DNA, 33 bp, Botrytis fragariae; identical to SEQ ID NO: 5341
  source 1..33: mol_type = other DNA

SEQ ID NO: 5443 - DNA, 33 bp, Botrytis fragariae; identical to SEQ ID NO: 5172
  source 1..33: mol_type = other DNA

SEQ ID NO: 5444 - DNA, 33 bp, Botrytis galanthina
  source 1..33: mol_type = other DNA
acgtttgcatggttgtcctgggcgtccgcacca

SEQ ID NO: 5445 - DNA, 39 bp, Botrytis cinerea
  source 1..39: mol_type = other DNA
agcttctctcttgcatggttgtcctgggcgtccgcacca

SEQ ID NO: 5446 - DNA, 39 bp, Botrytis cinerea; identical to SEQ ID NO: 5445
  source 1..39: mol_type = other DNA

SEQ ID NO: 5447 - DNA, 39 bp, Botrytis cinerea; identical to SEQ ID NO: 5445
  source 1..39: mol_type = other DNA

SEQ ID NO: 5448 - DNA, 36 bp, Botrytis fragariae
  source 1..36: mol_type = other DNA
atcacgtttgcaaggttgtcctgggcgtccacacca

SEQ ID NO: 5449 - DNA, 42 bp, Ophiocordyceps camponoti-floridani; identical to SEQ ID NO: 5352
  source 1..42: mol_type = other DNA

SEQ ID NO: 5450 - DNA, 42 bp, Ophiocordyceps camponoti-floridani
  source 1..42: mol_type = other DNA
cctcttgaccttggagcagattgagttgggtcgcgtgcacca

SEQ ID NO: 5451 - DNA, 42 bp, Ophiocordyceps camponoti-floridani; identical to SEQ ID NO: 5450
  source 1..42: mol_type = other DNA

SEQ ID NO: 5452 - DNA, 42 bp, Ophiocordyceps camponoti-floridani; identical to SEQ ID NO: 5450
  source 1..42: mol_type = other DNA

SEQ ID NO: 5453 - DNA, 36 bp, Dothistroma septosporum
  source 1..36: mol_type = other DNA
cgatgcactgttccaggtcttgcttgcggaaagcga

SEQ ID NO: 5454 - DNA, 33 bp, Cryphonectria parasitica; identical to SEQ ID NO: 5360
  source 1..33: mol_type = other DNA

SEQ ID NO: 5455 - DNA, 30 bp, Botrytis cinerea; identical to SEQ ID NO: 5364
  source 1..30: mol_type = other DNA

SEQ ID NO: 5456 - DNA, 30 bp, Botrytis cinerea; identical to SEQ ID NO: 5364
  source 1..30: mol_type = other DNA

SEQ ID NO: 5457 - DNA, 30 bp, Botrytis cinerea; identical to SEQ ID NO: 5364
  source 1..30: mol_type = other DNA

SEQ ID NO: 5458 - DNA, 30 bp, Botrytis fragariae; identical to SEQ ID NO: 4972
  source 1..30: mol_type = other DNA

SEQ ID NO: 5459 - DNA, 30 bp, Botrytis fragariae; identical to SEQ ID NO: 4972
  source 1..30: mol_type = other DNA

SEQ ID NO: 5460 - DNA, 30 bp, Botrytis galanthina; identical to SEQ ID NO: 5372
  source 1..30: mol_type = other DNA

SEQ ID NO: 5461 - DNA, 30 bp, Botrytis cinerea; identical to SEQ ID NO: 5372
  source 1..30: mol_type = other DNA

SEQ ID NO: 5462 - DNA, 30 bp, Botrytis cinerea; identical to SEQ ID NO: 5372
  source 1..30: mol_type = other DNA

SEQ ID NO: 5463 - DNA, 30 bp, Botrytis cinerea; identical to SEQ ID NO: 5372
  source 1..30: mol_type = other DNA

SEQ ID NO: 5464 - DNA, 30 bp, Botrytis tulipae
  source 1..30: mol_type = other DNA
cttgcatggttgtcctgggcgtccacacca

SEQ ID NO: 5465 - DNA, 30 bp, Botryotinia narcissicola
  source 1..30: mol_type = other DNA
cttgcatggttgtcctgggcgtccgcacca

SEQ ID NO: 5466 - DNA, 36 bp, Cryphonectria parasitica
  source 1..36: mol_type = other DNA
gcgcttccagcagccctcgccgtggaacaggcacca

SEQ ID NO: 5467 - DNA, 42 bp, Cryphonectria parasitica
  source 1..42: mol_type = other DNA
gcgcttgaccttccagcagccctcaccgtggaagagacacca

SEQ ID NO: 5468 - DNA, 33 bp, Botrytis cinerea
  source 1..33: mol_type = other DNA
gcgcttgcatggttgtccgggacgtccacacca

SEQ ID NO: 5469 - DNA, 33 bp, Botrytis cinerea; identical to SEQ ID NO: 5468
  source 1..33: mol_type = other DNA

SEQ ID NO: 5470 - DNA, 33 bp, Botrytis cinerea; identical to SEQ ID NO: 5468
  source 1..33: mol_type = other DNA

SEQ ID NO: 5471 - DNA, 33 bp, Botryotinia narcissicola; identical to SEQ ID NO: 5468
  source 1..33: mol_type = other DNA

SEQ ID NO: 5472 - DNA, 42 bp, Lophiostoma macrostomum
  source 1..42: mol_type = other DNA
gcgcttggctttgccgcagggttggccgcggtagtggcagaa

SEQ ID NO: 5473 - DNA, 36 bp, Colletotrichum gloeosporioides
  source 1..36: mol_type = other DNA
gcgtttccagcagggctggccgggtttggtgcacca

SEQ ID NO: 5474 - DNA, 27 bp, Lophium mytilinum
  source 1..27: mol_type = other DNA
ggagcaagattgacctgggagatggca

SEQ ID NO: 5475 - DNA, 30 bp, Ophiocordyceps camponoti-floridani
  source 1..30: mol_type = other DNA
ggagcagatggagttgggacgtgtgcacca

SEQ ID NO: 5476 - DNA, 33 bp, Sclerotinia sclerotiorum
  source 1..33: mol_type = other DNA
tctcttacaaggttgaccaggacgtccgcacca

SEQ ID NO: 5477 - DNA, 33 bp, Monilinia fructigena
  source 1..33: mol_type = other DNA
tctcttgcatccttgtccgggacgtccgcacca

SEQ ID NO: 5478 - DNA, 33 bp, Monilinia fructicola; identical to SEQ ID NO: 5477
  source 1..33: mol_type = other DNA

SEQ ID NO: 5479 - DNA, 33 bp, Dothistroma septosporum
  source 1..33: mol_type = other DNA
tgcaccgttccgggtctcgcatgcggtaagcgt

SEQ ID NO: 5480 - DNA, 39 bp, Mytilinidion resinicola
  source 1..39: mol_type = other DNA
tgccatcttccgggacagtcttgtagcaaggacaagcgc

SEQ ID NO: 5481 - DNA, 33 bp, Botrytis elliptica; identical to SEQ ID NO: 5301
  source 1..33: mol_type = other DNA

SEQ ID NO: 5482 - DNA, 33 bp, Monilinia laxa
  source 1..33: mol_type = other DNA
tggtgcggacgtcccggccaaggttgcaagcgt

SEQ ID NO: 5483 - DNA, 30 bp, Botryotinia convoluta
  source 1..30: mol_type = other DNA
tggtgcggacgtcctggacaaccatgtaag

SEQ ID NO: 5484 - DNA, 33 bp, Botryotinia convoluta
  source 1..33: mol_type = other DNA
tggtgcggacgtcctggacaaccatgtaagcgt

SEQ ID NO: 5485 - DNA, 30 bp, Sclerotinia sclerotiorum
  source 1..30: mol_type = other DNA
tggtgcggacgtcctggtcaaccttgtaag

SEQ ID NO: 5486 - DNA, 33 bp, Sclerotinia sclerotiorum
  source 1..33: mol_type = other DNA
tggtgcggacgtcctggtcaaccttgtaagaga

SEQ ID NO: 5487 - DNA, 33 bp, Rutstroemia sp.
  source 1..33: mol_type = other DNA; note = NJR-2017a BBW
tggtgcggccgtcccggccaaccctgcaaacgc

SEQ ID NO: 5488 - DNA, 30 bp, Rutstroemia sp.
  source 1..30: mol_type = other DNA; note = NJR-2017a BVV2
tggtgcggccgtcccgggcaaccctgcaag

SEQ ID NO: 5489 - DNA, 33 bp, Rutstroemia sp.
  source 1..33: mol_type = other DNA; note = NJR-2017a BVV2
tggtgcggccgtcccgggcaaccctgcaagcgt

SEQ ID NO: 5490 - DNA, 30 bp, Botrytis hyacinthi
  source 1..30: mol_type = other DNA
tggtgcgggcgcccaggacaaccatgcaag

SEQ ID NO: 5491 - DNA, 33 bp, Botrytis hyacinthi
  source 1..33: mol_type = other DNA
tggtgcgggcgcccaggacaaccatgcaagcgt

SEQ ID NO: 5492 - DNA, 30 bp, Rutstroemia sp.
  source 1..30: mol_type = other DNA; note = NJR-2017a BBW
tggtgcggtcgtcccggacagccttgcaag

SEQ ID NO: 5493 - DNA, 33 bp, Diaporthe ampelina
  source 1..33: mol_type = other DNA
tggtgcttctggaagggccaggggtgctggaag

SEQ ID NO: 5494 - DNA, 33 bp, Coniella lustricola; identical to SEQ ID NO: 5429
  source 1..33: mol_type = other DNA

SEQ ID NO: 5495 - DNA, 36 bp, Coniella lustricola
  source 1..36: mol_type = other DNA
tggtgcttgttccacggtgagggatgctggaagcgt

SEQ ID NO: 5496 - DNA, 36 bp, Colletotrichum aenigma; identical to SEQ ID NO: 5430
  source 1..36: mol_type = other DNA

SEQ ID NO: 5497 - DNA, 36 bp, Colletotrichum siamense
  source 1..36: mol_type = other DNA
tggtgtaccaagcccggccaaccgtgctggaagcgc

SEQ ID NO: 5498 - DNA, 33 bp, Metarhizium anisopliae
  source 1..33: mol_type = other DNA
tggtgtcgcgcgccaggaagacgagcttggcgg

SEQ ID NO: 5499 - DNA, 33 bp, Coniella lustricola
  source 1..33: mol_type = other DNA
tggtgtctcttccacggcgaaggttgctggaag

SEQ ID NO: 5500 - DNA, 27 bp, Botrytis hyacinthi
  source 1..27: mol_type = other DNA
tggtgtggacgcccaggacaaccatgt

SEQ ID NO: 5501 - DNA, 30 bp, Botrytis paeoniae
  source 1..30: mol_type = other DNA
tggtgtggacgcccaggacaaccttgcaaa

SEQ ID NO: 5502 - DNA, 33 bp, Botrytis paeoniae
  source 1..33: mol_type = other DNA
tggtgtggacgcccaggacaaccttgcaaacgt

SEQ ID NO: 5503 - DNA, 30 bp, Botryotinia calthae; identical to SEQ ID NO: 441
  source 1..30: mol_type = other DNA

SEQ ID NO: 5504 - DNA, 33 bp, Botryotinia calthae
  source 1..33: mol_type = other DNA
tggtgtggacgtcccggacaaccatgcaagcgt

SEQ ID NO: 5505 - DNA, 18 bp, Aspergillus fumigatiaffinis
  source 1..18: mol_type = other DNA
tggtgtttgatacccggt

SEQ ID NO: 5506 - DNA, 39 bp, Diplocarpon rosae
  source 1..39: mol_type = other DNA
tgtggacaccctggacaaccttgcggaaaggccaagcgt

SEQ ID NO: 5507 - DNA, 30 bp, Cadophora sp.
  source 1..30: mol_type = other DNA; note = DSE1049
tgtggccacccaggtcagccatgcggcaaa

SEQ ID NO: 5508 - DNA, 30 bp, Cadophora sp.
  source 1..30: mol_type = other DNA; note = DSE1049
tgtggtcacccaggccaaccctgtggcaag

SEQ ID NO: 5509 - DNA, 30 bp, Venustampulla echinocandica
  source 1..30: mol_type = other DNA
tttccagcagccctggccgacgtgggtgca

SEQ ID NO: 5510 - DNA, 30 bp, Rutstroemia sp.
  source 1..30: mol_type = other DNA; note = NJR-2017a WRK4
tttgcagggttgcccggggcggccgcacca

SEQ ID NO: 5511 - DNA, 30 bp, Sclerotinia sclerotiorum
  source 1..30: mol_type = other DNA; note = 1980 UF-70
tttgcatggttgtccgggacgtccacacca

SEQ ID NO: 5512 - DNA, 33 bp, Botrytis fragariae; identical to SEQ ID NO: 5172
  source 1..33: mol_type = other DNA

SEQ ID NO: 5513 - DNA, 33 bp, Botrytis fragariae; identical to SEQ ID NO: 4914
  source 1..33: mol_type = other DNA

SEQ ID NO: 5514 - DNA, 36 bp, Botrytis fragariae
  source 1..36: mol_type = other DNA
atcgcgcttgcatggctgtccgggacggccacacca

SEQ ID NO: 5515 - DNA, 42 bp, Ophiocordyceps camponoti-floridani; identical to SEQ ID NO: 5450
  source 1..42: mol_type = other DNA

SEQ ID NO: 5516 - DNA, 39 bp, Ophiocordyceps camponoti-floridani
  source 1..39: mol_type = other DNA
cctcttggggccgcactgcgagttgggacggtagcacca

SEQ ID NO: 5517 - DNA, 36 bp, Dothistroma septosporum
  source 1..36: mol_type = other DNA
cgatgtaccgttccaggtcttgcttgtggcaagcgt

SEQ ID NO: 5518 - DNA, 30 bp, Botrytis cinerea; identical to SEQ ID NO: 5364
  source 1..30: mol_type = other DNA

SEQ ID NO: 5519 - DNA, 30 bp, Botrytis cinerea; identical to SEQ ID NO: 5364
  source 1..30: mol_type = other DNA

SEQ ID NO: 5520 - DNA, 30 bp, Botrytis cinerea; identical to SEQ ID NO: 5364
  source 1..30: mol_type = other DNA

SEQ ID NO: 5521 - DNA, 30 bp, Botrytis galanthina
  source 1..30: mol_type = other DNA
cttgcatggttgtccggggcgtccgcacca

SEQ ID NO: 5522 - DNA, 30 bp, Botrytis tulipae; identical to SEQ ID NO: 5521
  source 1..30: mol_type = other DNA

SEQ ID NO: 5523 - DNA, 30 bp, Botrytis fragariae; identical to SEQ ID NO: 5465
  source 1..30: mol_type = other DNA

SEQ ID NO: 5524 - DNA, 30 bp, Botrytis fragariae; identical to SEQ ID NO: 5465
  source 1..30: mol_type = other DNA

SEQ ID NO: 5525 - DNA, 30 bp, Botrytis galanthina; identical to SEQ ID NO: 5465
  source 1..30: mol_type = other DNA

SEQ ID NO: 5526 - DNA, 30 bp, Botrytis cinerea; identical to SEQ ID NO: 5465
  source 1..30: mol_type = other DNA

SEQ ID NO: 5527 - DNA, 30 bp, Botrytis cinerea; identical to SEQ ID NO: 5465
  source 1..30: mol_type = other DNA

SEQ ID NO: 5528 - DNA, 30 bp, Botrytis cinerea; identical to SEQ ID NO: 5465
  source 1..30: mol_type = other DNA

SEQ ID NO: 5529 - DNA, 30 bp, Botrytis tulipae; identical to SEQ ID NO: 5465
  source 1..30: mol_type = other DNA

SEQ ID NO: 5530 - DNA, 27 bp, Ophiocordyceps camponoti-floridani
  source 1..27: mol_type = other DNA
gcactgcgagttgggacgcgtgcacca

SEQ ID NO: 5531 - DNA, 27 bp, Ophiocordyceps camponoti-floridani
  source 1..27: mol_type = other DNA
gcactgcgagttgggacgcgtgcacca

SEQ ID NO: 5532 - DNA, 33 bp, Botrytis cinerea
  source 1..33: mol_type = other DNA
gcgcttacatggctgtcctgggcgtccgcacca

SEQ ID NO: 5533 - DNA, 33 bp, Botrytis cinerea; identical to SEQ ID NO: 5532
  source 1..33: mol_type = other DNA

SEQ ID NO: 5534 - DNA, 33 bp, Botrytis cinerea; identical to SEQ ID NO: 5532
  source 1..33: mol_type = other DNA

SEQ ID NO: 5535 - DNA, 36 bp, Cryphonectria parasitica
  source 1..36: mol_type = other DNA
gcgcttccagcagccctcgccgtggaagaggcacca

SEQ ID NO: 5536 - DNA, 42 bp, Cryphonectria parasitica
  source 1..42: mol_type = other DNA
gcgcttctccttccagcagccctcgccgtggaagagacacca

SEQ ID NO: 5537 - DNA, 33 bp, Botryotinia narcissicola
  source 1..33: mol_type = other DNA
gcgtttgcatggttgtccgggacgtccgcacca

SEQ ID NO: 5538 - DNA, 27 bp, Lophium mytilinum
  source 1..27: mol_type = other DNA
ggagcaagattggccggggagatggca

SEQ ID NO: 5539 - DNA, 30 bp, Ophiocordyceps camponoti-floridani
  source 1..30: mol_type = other DNA
ggagcagatggagttggggcgcgtgcacca

SEQ ID NO: 5540 - DNA, 36 bp, Botrytis cinerea
  source 1..36: mol_type = other DNA
ggtacgcttgcatggttgtcctgggcgtccgcacca

SEQ ID NO: 5541 - DNA, 36 bp, Botrytis cinerea; identical to SEQ ID NO: 5540
  source 1..36: mol_type = other DNA

SEQ ID NO: 5542 - DNA, 36 bp, Botrytis cinerea; identical to SEQ ID NO: 5540
  source 1..36: mol_type = other DNA

SEQ ID NO: 5543 - DNA, 33 bp, Dothistroma septosporum
  source 1..33: mol_type = other DNA
tgcactgtcccaggcctcgcctgcggcaaacga

SEQ ID NO: 5544 - DNA, 39 bp, Mytilinidion resinicola
  source 1..39: mol_type = other DNA
tgccatcttccgggccagtcttgcagcaaggacaagcgc

SEQ ID NO: 5545 - DNA, 33 bp, Rutstroemia sp.
  source 1..33: mol_type = other DNA; note = NJR-2017a BBW
tggtgcggtcgtcccggacagccttgcaagcga

SEQ ID NO: 5546 - DNA, 30 bp, Rutstroemia sp.
  source 1..30: mol_type = other DNA; note = NJR-2017a BVV2
tggtgcggtcgtcctggacagccttgcaag

SEQ ID NO: 5547 - DNA, 33 bp, Rutstroemia sp.
  source 1..33: mol_type = other DNA; note = NJR-2017a BVV2
tggtgcggtcgtcctggacagccttgcaagaga

SEQ ID NO: 5548 - DNA, 33 bp, Coniella lustricola; identical to SEQ ID NO: 5499
  source 1..33: mol_type = other DNA

SEQ ID NO: 5549 - DNA, 36 bp, Coniella lustricola
  source 1..36: mol_type = other DNA
tggtgtctcttccacggcgaaggttgctggaagcgc

SEQ ID NO: 5550 - DNA, 42 bp, Coniella lustricola
  source 1..42: mol_type = other DNA
tggtgtctcttccacggtgagggttgctggaaggtcaagcgc

SEQ ID NO: 5551 - DNA, 30 bp, Botrytis hyacinthi
  source 1..30: mol_type = other DNA
tggtgtggacgcccaggacaaccatgtaag

SEQ ID NO: 5552 - DNA, 33 bp, Botrytis hyacinthi
  source 1..33: mol_type = other DNA
tggtgtggacgcccaggacaaccatgtaagcgc

SEQ ID NO: 5553 - DNA, 33 bp, Botrytis elliptica; identical to SEQ ID NO: 5320
  source 1..33: mol_type = other DNA

SEQ ID NO: 5554 - DNA, 27 bp, Botrytis hyacinthi
  source 1..27: mol_type = other DNA
tggtgtggacgcccaggacaaccttgc

SEQ ID NO: 5555 - DNA, 30 bp, Sclerotinia sclerotiorum
  source 1..30: mol_type = other DNA
tggtgtggacgtcccggacaaccatgcaaa

SEQ ID NO: 5556 - DNA, 33 bp, Sclerotinia sclerotiorum
  source 1..33: mol_type = other DNA
tggtgtggacgtcccggacaaccatgcaaacgc

SEQ ID NO: 5557 - DNA, 30 bp, Botryotinia convoluta; identical to SEQ ID NO: 441
  source 1..30: mol_type = other DNA

SEQ ID NO: 5558 - DNA, 33 bp, Botryotinia convoluta; identical to SEQ ID NO: 5504
  source 1..33: mol_type = other DNA

SEQ ID NO: 5559 - DNA, 30 bp, Botryotinia calthae; identical to SEQ ID NO: 932
  source 1..30: mol_type = other DNA

SEQ ID NO: 5560 - DNA, 33 bp, Botryotinia calthae
  source 1..33: mol_type = other DNA
tggtgtggacgtcccgggcaaccatgcaagcgc

SEQ ID NO: 5561 - DNA, 30 bp, Botrytis paeoniae
  source 1..30: mol_type = other DNA
tggtgtggacgtcctggacaaccatgcaag

SEQ ID NO: 5562 - DNA, 33 bp, Botrytis paeoniae
  source 1..33: mol_type = other DNA
tggtgtggacgtcctggacaaccatgcaagaga

SEQ ID NO: 5563 - DNA, 33 bp, Cadophora sp.
  source 1..33: mol_type = other DNA; note = DSE1049
tgtggtcacccaggccaaccctgtggcaagcgt

SEQ ID NO: 5564 - DNA, 39 bp, Cadophora sp.
  source 1..39: mol_type = other DNA; note = DSE1049
tgtggtcacccaggccagccctgcggaaaggccaaacgt

SEQ ID NO: 5565 - DNA, 30 bp, Botryotinia narcissicola
  source 1..30: mol_type = other DNA
tttacatggttgaccggggcgtccgcacca

SEQ ID NO: 5566 - DNA, 30 bp, Sclerotinia sclerotiorum
  source 1..30: mol_type = other DNA
tttgcatggttggccggggcgtccgcacca

SEQ ID NO: 5567 - DNA, 30 bp, Sclerotinia sclerotiorum
  source 1..30: mol_type = other DNA
tttgcatggttgtccgggacgtccgcacca

SEQ ID NO: 5568 - DNA, 33 bp, Botrytis fragariae; identical to SEQ ID NO: 4914
  source 1..33: mol_type = other DNA

SEQ ID NO: 5569 - DNA, 39 bp, Ophiocordyceps camponoti-floridani; identical to SEQ ID NO: 5516
  source 1..39: mol_type = other DNA

SEQ ID NO: 5570 - DNA, 36 bp, Dothistroma septosporum
  source 1..36: mol_type = other DNA; strain = NZE10
cgatgtactgtcccgggcctcgcctgtggcaagcgg

SEQ ID NO: 5571 - DNA, 36 bp, Botrytis fragariae
  source 1..36: mol_type = other DNA
ctcacgtttacatggttgcccggggcgtccgcacca

SEQ ID NO: 5572 - DNA, 33 bp, Botrytis fragariae
  source 1..33: mol_type = other DNA
ctccttgcatggttgaccagggcgtccgcacca

SEQ ID NO: 5573 - DNA, 39 bp, Botrytis fragariae
  source 1..39: mol_type = other DNA
cttggccttgcggcaaggttgtcctggacgtccgcacca

SEQ ID NO: 5574 - DNA, 36 bp, Ophiocordyceps camponoti-floridani
  source 1..36: mol_type = other DNA
cttggggccgcactgcgagttgggacgcgtgcacca

SEQ ID NO: 5575 - DNA, 27 bp, Ophiocordyceps camponoti-floridani
  source 1..27: mol_type = other DNA
gcactgcgagttgggacggtagcacca

SEQ ID NO: 5576 - DNA, 27 bp, Ophiocordyceps camponoti-floridani
  source 1..27: mol_type = other DNA
gcactgcgagttgggacggtagcacca

SEQ ID NO: 5577 - DNA, 33 bp, Botrytis galanthina; identical to SEQ ID NO: 5218
  source 1..33: mol_type = other DNA

SEQ ID NO: 5578 - DNA, 33 bp, Botrytis tulipae; identical to SEQ ID NO: 5218
  source 1..33: mol_type = other DNA

SEQ ID NO: 5579 - DNA, 36 bp, Cryphonectria parasitica
  source 1..36: mol_type = other DNA
gcgcttccagcagccttctccgtggaagaggcacca

SEQ ID NO: 5580 - DNA, 33 bp, Botrytis cinerea; identical to SEQ ID NO: 5378
  source 1..33: mol_type = other DNA

SEQ ID NO: 5581 - DNA, 33 bp, Botrytis cinerea; identical to SEQ ID NO: 5378
  source 1..33: mol_type = other DNA

SEQ ID NO: 5582 - DNA, 33 bp, Botrytis cinerea; identical to SEQ ID NO: 5378
  source 1..33: mol_type = other DNA

SEQ ID NO: 5583 - DNA, 42 bp, Botrytis fragariae; identical to SEQ ID NO: 3622
  source 1..42: mol_type = other DNA

SEQ ID NO: 5584 - DNA, 27 bp, Lophium mytilinum
  source 1..27: mol_type = other DNA
ggagcaagattggcctgggagatggca

SEQ ID NO: 5585 - DNA, 33 bp, Botryotinia narcissicola
  source 1..33: mol_type = other DNA
tctcttgcatggttgtcctgggcgtccgcacca

SEQ ID NO: 5586 - DNA, 33 bp, Dothistroma septosporum
  source 1..33: mol_type = other DNA
tgcactgtcccaggtctcgcctgtggcaaacgc

SEQ ID NO: 5587 - DNA, 39 bp, Mytilinidion resinicola
  source 1..39: mol_type = other DNA
tgccatcttcctggtcaatcttgcagcaaggacaagcgc

SEQ ID NO: 5588 - DNA, 33 bp, Ophiocordyceps camponoti-floridani
  source 1..33: mol_type = other DNA
tggctgacaagaccgtccccgagatgcagccct

SEQ ID NO: 5589 - DNA, 33 bp, Coniella lustricola
  source 1..33: mol_type = other DNA
tggtgtctcttccacggcgagggctgctggaaa

SEQ ID NO: 5590 - DNA, 42 bp, Coniella lustricola
  source 1..42: mol_type = other DNA
tggtgtctcttccacggcgagggctgctggaaagagaagcgt

SEQ ID NO: 5591 - DNA, 30 bp, Botrytis hyacinthi; identical to SEQ ID NO: 5501
  source 1..30: mol_type = other DNA

SEQ ID NO: 5592 - DNA, 33 bp, Botrytis hyacinthi; identical to SEQ ID NO: 5502
  source 1..33: mol_type = other DNA

SEQ ID NO: 5593 - DNA, 27 bp, Botrytis hyacinthi
  source 1..27: mol_type = other DNA
tggtgtggacgtcccggacaaccatgc

SEQ ID NO: 5594 - DNA, 33 bp, Botrytis elliptica
  source 1..33: mol_type = other DNA
tggtgtggacgtcccggacaaccatgcaagcgc

SEQ ID NO: 5595 - DNA, 30 bp, Cadophora sp.
  source 1..30: mol_type = other DNA; note = DSE1049
tgtggtcacccaggccagccctgcggaaag

SEQ ID NO: 5596 - DNA, 30 bp, Cadophora sp.
  source 1..30: mol_type = other DNA; note = DSE1049
tgtggtcacccaggtcagccttgcggaaag

SEQ ID NO: 5597 - DNA, 30 bp, Botrytis tulipae; identical to SEQ ID NO: 5565
  source 1..30: mol_type = other DNA

SEQ ID NO: 5598 - DNA, 30 bp, Botrytis cinerea
  source 1..30: mol_type = other DNA
tttacatggttgcccggggcgtccgcacca

SEQ ID NO: 5599 - DNA, 30 bp, Botrytis cinerea; identical to SEQ ID NO: 5598
  source 1..30: mol_type = other DNA

SEQ ID NO: 5600 - DNA, 30 bp, Botrytis cinerea; identical to SEQ ID NO: 5598
  source 1..30: mol_type = other DNA

SEQ ID NO: 5601 - DNA, 30 bp, Botrytis galanthina
  source 1..30: mol_type = other DNA
tttacatggttgtccggggcgtccgcacca

SEQ ID NO: 5602 - DNA, 30 bp, Botryotinia narcissicola
  source 1..30: mol_type = other DNA
tttgcaaggttgtcctgggcgtccacacca

SEQ ID NO: 5603 - DNA, 36 bp, Dothistroma septosporum
  source 1..36: mol_type = other DNA
cgctgcacagtcccaggtcttgcttgcggtaagcga

SEQ ID NO: 5604 - DNA, 36 bp, Botrytis fragariae
  source 1..36: mol_type = other DNA
ctcgcgtttacatggttgtcctgggcgtccgcacca

SEQ ID NO: 5605 - DNA, 30 bp, Botrytis fragariae; identical to SEQ ID NO: 5367
  source 1..30: mol_type = other DNA

SEQ ID NO: 5606 - DNA, 36 bp, Ophiocordyceps camponoti-floridani; identical to SEQ ID NO: 5574
  source 1..36: mol_type = other DNA

SEQ ID NO: 5607 - DNA, 39 bp, Botrytis fragariae
  source 1..39: mol_type = other DNA
cttgttcttgcggcaaggttgtcctgggcgtccgcacca

SEQ ID NO: 5608 - DNA, 42 bp, Ophiocordyceps camponoti-floridani
  source 1..42: mol_type = other DNA
gcgcttgaccttggagcagatggagttgggacgtgtgcacca

SEQ ID NO: 5609 - DNA, 42 bp, Ophiocordyceps camponoti-floridani; identical to SEQ ID NO: 5608
  source 1..42: mol_type = other DNA

SEQ ID NO: 5610 - DNA, 42 bp, Ophiocordyceps camponoti-floridani; identical to SEQ ID NO: 5608
  source 1..42: mol_type = other DNA

SEQ ID NO: 5611 - DNA, 33 bp, Botrytis tulipae
  source 1..33: mol_type = other DNA
gcgcttgcatggctgaccggggcgtccgcacca

SEQ ID NO: 5612 - DNA, 33 bp, Botrytis fragariae
  source 1..33: mol_type = other DNA
gcgcttgcatggctgtccgggacggccacacca

SEQ ID NO: 5613 - DNA, 33 bp, Botrytis galanthina; identical to SEQ ID NO: 5378
  source 1..33: mol_type = other DNA

SEQ ID NO: 5614 - DNA, 33 bp, Botrytis cinerea; identical to SEQ ID NO: 5468
  source 1..33: mol_type = other DNA

SEQ ID NO: 5615 - DNA, 33 bp, Botrytis cinerea; identical to SEQ ID NO: 5468
  source 1..33: mol_type = other DNA

SEQ ID NO: 5616 - DNA, 33 bp, Botrytis cinerea; identical to SEQ ID NO: 5468
  source 1..33: mol_type = other DNA

SEQ ID NO: 5617 - DNA, 42 bp, Botrytis fragariae; identical to SEQ ID NO: 3662
  source 1..42: mol_type = other DNA

SEQ ID NO: 5618 - DNA, 33 bp, Dothistroma septosporum
  source 1..33: mol_type = other DNA
tgcactgtccctggtcttgcttgtgggaagcgg

SEQ ID NO: 5619 - DNA, 33 bp, Coniella lustricola
  source 1..33: mol_type = other DNA
tggtgtctcttccacggtgagggttgctggaag

SEQ ID NO: 5620 - DNA, 30 bp, Botrytis hyacinthi; identical to SEQ ID NO: 441
  source 1..30: mol_type = other DNA

SEQ ID NO: 5621 - DNA, 33 bp, Botrytis hyacinthi; identical to SEQ ID NO: 5594
  source 1..33: mol_type = other DNA

SEQ ID NO: 5622 - DNA, 33 bp, Botrytis elliptica
  source 1..33: mol_type = other DNA
tggtgtggacgtcccggacaaccatgtaagcgt

SEQ ID NO: 5623 - DNA, 42 bp, Botrytis hyacinthi
  source 1..42: mol_type = other DNA
tggtgtggacgtcccggacaaccttgcagtgccgttaagcgt

SEQ ID NO: 5624 - DNA, 39 bp, Mytilinidion resinicola
  source 1..39: mol_type = other DNA
tgtcatctccccggccagtcttgcagcaaggataagcgc

SEQ ID NO: 5625 - DNA, 33 bp, Cadophora sp.
  source 1..33: mol_type = other DNA; note = DSE1049
tgtggtcacccaggtcagccttgcggaaagcgt

SEQ ID NO: 5626 - DNA, 30 bp, Botrytis cinerea
  source 1..30: mol_type = other DNA
tttacatggttgtccggggcgtccacacca

SEQ ID NO: 5627 - DNA, 30 bp, Botrytis cinerea; identical to SEQ ID NO: 5626
  source 1..30: mol_type = other DNA

SEQ ID NO: 5628 - DNA, 30 bp, Botrytis cinerea; identical to SEQ ID NO: 5626
  source 1..30: mol_type = other DNA

SEQ ID NO: 5629 - DNA, 30 bp, Botryotinia narcissicola; identical to SEQ ID NO: 5602
  source 1..30: mol_type = other DNA

SEQ ID NO: 5630 - DNA, 30 bp, Botrytis tulipae; identical to SEQ ID NO: 5602
  source 1..30: mol_type = other DNA

SEQ ID NO: 5631 - DNA, 30 bp, Botrytis galanthina; identical to SEQ ID NO: 5602
  source 1..30: mol_type = other DNA

SEQ ID NO: 5632 - DNA, 30 bp, Botryotinia narcissicola; identical to SEQ ID NO: 5567
  source 1..30: mol_type = other DNA

SEQ ID NO: 5633 - DNA, 36 bp, Dothistroma septosporum
  source 1..36: mol_type = other DNA
cgctgcaccgtacccggcctcgcctgcggcaagcgc

SEQ ID NO: 5634 - DNA, 36 bp, Botrytis fragariae
  source 1..36: mol_type = other DNA
ctctctcttgcatggttgtcctgggcgtccgcacca

SEQ ID NO: 5635 - DNA, 33 bp, Botrytis fragariae
  source 1..33: mol_type = other DNA
cttgcggcaaggttgtcctggacgtccgcacca

SEQ ID NO: 5636 - DNA, 42 bp, Ophiocordyceps camponoti-floridani; identical to SEQ ID NO: 5608
  source 1..42: mol_type = other DNA

SEQ ID NO: 5637 - DNA, 33 bp, Botrytis fragariae; identical to SEQ ID NO: 5378
  source 1..33: mol_type = other DNA

SEQ ID NO: 5638 - DNA, 33 bp, Botrytis galanthina; identical to SEQ ID NO: 5468
  source 1..33: mol_type = other DNA

SEQ ID NO: 5639 - DNA, 33 bp, Botrytis cinerea
  source 1..33: mol_type = other DNA
gcgtttacatggttgcccggggcgtccgcacca

SEQ ID NO: 5640 - DNA, 33 bp, Botrytis cinerea; identical to SEQ ID NO: 5639
  source 1..33: mol_type = other DNA

SEQ ID NO: 5641 - DNA, 33 bp, Botrytis cinerea; identical to SEQ ID NO: 5639
  source 1..33: mol_type = other DNA

SEQ ID NO: 5642 - DNA, 42 bp, Ophiocordyceps camponoti-floridani
  source 1..42: mol_type = other DNA
tctcttgactttggggcagatggagttggggcgcttgcacca

SEQ ID NO: 5643 - DNA, 42 bp, Ophiocordyceps camponoti-floridani; identical to SEQ ID NO: 5642
  source 1..42: mol_type = other DNA

SEQ ID NO: 5644 - DNA, 42 bp, Ophiocordyceps camponoti-floridani; identical to SEQ ID NO: 5642
  source 1..42: mol_type = other DNA

SEQ ID NO: 5645 - DNA, 33 bp, Botrytis tulipae
  source 1..33: mol_type = other DNA
tctcttgcatggttgtcctgggcgtccacacca

SEQ ID NO: 5646 - DNA, 33 bp, Dothistroma septosporum
  source 1..33: mol_type = other DNA
tgcactgttccaggtcttgcatgcggaaagcgt

SEQ ID NO: 5647 - DNA, 27 bp, Botrytis hyacinthi
  source 1..27: mol_type = other DNA
tggtgtggacgtcccggacaaccttgc

SEQ ID NO: 5648 - DNA, 27 bp, Botrytis hyacinthi
  source 1..27: mol_type = other DNA
tggtgtggacgtcccggacaaccttgc

SEQ ID NO: 5649 - DNA, 27 bp, Botrytis hyacinthi
  source 1..27: mol_type = other DNA
tggtgtggacgtcccggtcaaccatgt

SEQ ID NO: 5650 - DNA, 30 bp, Botrytis fragariae; identical to SEQ ID NO: 5598
  source 1..30: mol_type = other DNA

SEQ ID NO: 5651 - DNA, 30 bp, Botrytis fragariae; identical to SEQ ID NO: 5598
  source 1..30: mol_type = other DNA

SEQ ID NO: 5652 - DNA, 30 bp, Botrytis cinerea
  source 1..30: mol_type = other DNA
tttgcagggttgtcctgggcgtccacacca

SEQ ID NO: 5653 - DNA, 30 bp, Botrytis cinerea; identical to SEQ ID NO: 5652
  source 1..30: mol_type = other DNA

SEQ ID NO: 5654 - DNA, 30 bp, Botrytis cinerea; identical to SEQ ID NO: 5652
  source 1..30: mol_type = other DNA

SEQ ID NO: 5655 - DNA, 30 bp, Botrytis tulipae; identical to SEQ ID NO: 5567
  source 1..30: mol_type = other DNA

SEQ ID NO: 5656 - DNA, 30 bp, Botrytis galanthina; identical to SEQ ID NO: 5567
  source 1..30: mol_type = other DNA

SEQ ID NO: 5657 - DNA, 36 bp, Dothistroma septosporum
  source 1..36: mol_type = other DNA
cgctgcaccgtccccggtcttgcctgcggtaagcgc

SEQ ID NO: 5658 - DNA, 33 bp, Botrytis fragariae
  source 1..33: mol_type = other DNA
cttgcggcaaggttgtcctgggcgtccgcacca

SEQ ID NO: 5659 - DNA, 33 bp, Botrytis fragariae; identical to SEQ ID NO: 5378
  source 1..33: mol_type = other DNA

SEQ ID NO: 5660 - DNA, 42 bp, Botrytis fragariae; identical to SEQ ID NO: 3622
  source 1..42: mol_type = other DNA

SEQ ID NO: 5661 - DNA, 33 bp, Ophiocordyceps camponoti-floridani
  source 1..33: mol_type = other DNA
ggggccggcatgcggagacggccggaaaagcca

SEQ ID NO: 5662 - DNA, 33 bp, Botrytis galanthina; identical to SEQ ID NO: 5585
  source 1..33: mol_type = other DNA

SEQ ID NO: 5663 - DNA, 33 bp, Botrytis cinerea; identical to SEQ ID NO: 5585
  source 1..33: mol_type = other DNA

SEQ ID NO: 5664 - DNA, 33 bp, Botrytis cinerea; identical to SEQ ID NO: 5585
  source 1..33: mol_type = other DNA

SEQ ID NO: 5665 - DNA, 33 bp, Botrytis cinerea
  source 1..33: mol_type = other DNA
tgcactgttccaggtcttgcttgcggaaagcga

SEQ ID NO: 5666 - DNA, 42 bp, Ophiocordyceps camponoti-floridani
  source 1..42: mol_type = other DNA
tggagcactcgaccatcatctatgagccgacgggcaaagagg

SEQ ID NO: 5667 - DNA, 36 bp, Ophiocordyceps camponoti-floridani
  source 1..36: mol_type = other DNA
tggatccgcatgccgaacagccgctgcccgaggctc

SEQ ID NO: 5668 - DNA, 39 bp, Ophiocordyceps camponoti-floridani
  source 1..39: mol_type = other DNA
tggctgacaagaccgtccccgagatgcagccctcctcgc

SEQ ID NO: 5669 - DNA, 30 bp, Botrytis hyacinthi
  source 1..30: mol_type = other DNA
tggtgtggacgtcccggtcaaccatgtaag

SEQ ID NO: 5670 - DNA, 33 bp, Botrytis hyacinthi
  source 1..33: mol_type = other DNA
tggtgtggacgtcccggtcaaccatgtaagcgt

SEQ ID NO: 5671 - DNA, 30 bp, Botrytis fragariae
  source 1..30: mol_type = other DNA
tttacatggttgtcctgggcgtccgcacca

SEQ ID NO: 5672 - DNA, 30 bp, Botrytis fragariae; identical to SEQ ID NO: 5671
  source 1..30: mol_type = other DNA

SEQ ID NO: 5673 - DNA, 30 bp, Botrytis galanthina
  source 1..30: mol_type = other DNA
tttgcatggttgtcctgggcgtccgcacca

SEQ ID NO: 5674 - DNA, 36 bp, Dothistroma septosporum
  source 1..36: mol_type = other DNA
cgctgcactgtcccaggcctcgcctgcggcaaacga

SEQ ID NO: 5675 - DNA, 33 bp, Botrytis fragariae; identical to SEQ ID NO: 5612
  source 1..33: mol_type = other DNA

SEQ ID NO: 5676 - DNA, 42 bp, Botrytis fragariae; identical to SEQ ID NO: 3622
  source 1..42: mol_type = other DNA

SEQ ID NO: 5677 - DNA, 33 bp, Botrytis fragariae
  source 1..33: mol_type = other DNA
gcgtttacatggttgtcctgggcgtccgcacca

SEQ ID NO: 5678 - DNA, 42 bp, Ophiocordyceps camponoti-floridani; identical to SEQ ID NO: 5642
  source 1..42: mol_type = other DNA

SEQ ID NO: 5679 - DNA, 33 bp, Dothistroma septosporum
  source 1..33: mol_type = other DNA
tgcactgttcctggtcttgcctgcggaaagcga

SEQ ID NO: 5680 - DNA, 30 bp, Botrytis fragariae; identical to SEQ ID NO: 5602
  source 1..30: mol_type = other DNA

SEQ ID NO: 5681 - DNA, 30 bp, Botrytis fragariae; identical to SEQ ID NO: 5602
  source 1..30: mol_type = other DNA

SEQ ID NO: 5682 - DNA, 36 bp, Dothistroma septosporum
  source 1..36: mol_type = other DNA
cgctgcactgtcccaggtctcgcctgtggcaaacgc

SEQ ID NO: 5683 - DNA, 33 bp, Botrytis fragariae; identical to SEQ ID NO: 5378
  source 1..33: mol_type = other DNA

SEQ ID NO: 5684 - DNA, 36 bp, Botrytis fragariae; identical to SEQ ID NO: 5540
  source 1..36: mol_type = other DNA

SEQ ID NO: 5685 - DNA, 36 bp, Botrytis fragariae
  source 1..36: mol_type = other DNA
tatttgtcggcaatccagccctggttcaaggcacca

SEQ ID NO: 5686 - DNA, 27 bp, Ophiocordyceps camponoti-floridani
  source 1..27: mol_type = other DNA
tggcgccaccgtccgaactccgagtgc

SEQ ID NO: 5687 - DNA, 33 bp, Dothistroma septosporum
  source 1..33: mol_type = other DNA
tgtaccgttccaggtcttgcttgtggcaagcgt

SEQ ID NO: 5688 - DNA, 30 bp, Botrytis fragariae; identical to SEQ ID NO: 5567
  source 1..30: mol_type = other DNA

SEQ ID NO: 5689 - DNA, 30 bp, Botrytis fragariae; identical to SEQ ID NO: 5567
  source 1..30: mol_type = other DNA

SEQ ID NO: 5690 - DNA, 36 bp, Dothistroma septosporum
  source 1..36: mol_type = other DNA
cgttgcaccgtgccaggtcttgcatgtggcaagcgt

SEQ ID NO: 5691 - DNA, 33 bp, Botrytis fragariae; identical to SEQ ID NO: 5677
  source 1..33: mol_type = other DNA

SEQ ID NO: 5692 - DNA, 33 bp, Botrytis fragariae; identical to SEQ ID NO: 5585
  source 1..33: mol_type = other DNA

SEQ ID NO: 5693 - DNA, 42 bp, Botrytis fragariae; identical to SEQ ID NO: 3662
  source 1..42: mol_type = other DNA

SEQ ID NO: 5694 - DNA, 33 bp, Dothistroma septosporum
  source 1..33: mol_type = other DNA
tgtactgtcccgggcctcgcctgtggcaagcgg

SEQ ID NO: 5695 - DNA, 33 bp, Botrytis fragariae; identical to SEQ ID NO: 5585
  source 1..33: mol_type = other DNA

SEQ ID NO: 5696 - DNA, 42 bp, Botrytis fragariae; identical to SEQ ID NO: 3662
  source 1..42: mol_type = other DNA

SEQ ID NO: 5697 - DNA, 33 bp, Botrytis fragariae
  source 1..33: mol_type = other DNA
ttgtcggcaatccagccctggttcaaggcacca

SEQ ID NO: 5698 - DNA, 39 bp, Botrytis fragariae
  source 1..39: mol_type = other DNA
tggtgcagttcttctggatctcaatgccgcaaagcttca

SEQ ID NO: 5699 - protein, 30 aa, synthetic construct
  REGION 1..30: note = Synthetic Construct
MGFVLFSQLPSFLLVSTLLLFLVISHSCRA

SEQ ID NO: 5700 - protein, 23 aa, synthetic construct
  REGION 1..23: note = Synthetic Construct
MATTKHLALAILVLLSIGMTTSA

SEQ ID NO: 5701 - protein, 6 aa, synthetic construct
  REGION 1..6: note = Synthetic Construct
QNSQQD

SEQ ID NO: 5702 - protein, 5 aa, synthetic construct
  REGION 1..5: note = Synthetic Construct
QNSQQ

SEQ ID NO: 5703 - protein, 4 aa, synthetic construct
  REGION 1..4: note = Synthetic Construct
QNSQ

SEQ ID NO: 5704 - protein, 9 aa, synthetic construct
  REGION 1..9: note = Synthetic Construct
QNSQQDYLD

SEQ ID NO: 5705 - protein, 7 aa, synthetic construct
  REGION 1..7: note = Synthetic Construct
QNSQQDY

SEQ ID NO: 5706 - protein, 5 aa, synthetic construct
  REGION 1..5: note = Synthetic Construct
RTLLD

SEQ ID NO: 5707 - protein, 49 aa, synthetic construct
  REGION 1..49: note = Synthetic Construct
MGFVLFSQLPSFLLVSTLLLFLVISHSCRAQNSQQDWHWLQLKPGQPMY

SEQ ID NO: 5708 - protein, 48 aa, synthetic construct
  REGION 1..48: note = Synthetic Construct
MGFVLFSQLPSFLLVSTLLLFLVISHSCRAQNSQQWHWLQLKPGQPMY

SEQ ID NO: 5709 - protein, 47 aa, synthetic construct
  REGION 1..47: note = Synthetic Construct
MGFVLFSQLPSFLLVSTLLLFLVISHSCRAQNSQWHWLQLKPGQPMY

SEQ ID NO: 5710 - protein, 43 aa, synthetic construct
  REGION 1..43: note = Synthetic Construct
MGFVLFSQLPSFLLVSTLLLFLVISHSCRAWHWLQLKPGQPMY

SEQ ID NO: 5711 - protein, 59 aa, synthetic construct
  REGION 1..59: note = Synthetic Construct
MGFVLFSQLPSFLLVSTLLLFLVISHSCRAQNSWHWLQLKPGQPMYWHWLQLKPGQPMY

SEQ ID NO: 5712 - protein, 58 aa, synthetic construct
  REGION 1..58: note = Synthetic Construct
MGFVLFSQLPSFLLVSTLLLFLVISHSCRAQNWHWLQLKPGQPMYWHWLQLKPGQPMY

SEQ ID NO: 5713 - protein, 57 aa, synthetic construct
  REGION 1..57: note = Synthetic Construct
MGFVLFSQLPSFLLVSTLLLFLVISHSCRAQWHWLQLKPGQPMYWHWLQLKPGQPMY

SEQ ID NO: 5714 - protein, 56 aa, synthetic construct
  REGION 1..56: note = Synthetic Construct
MGFVLFSQLPSFLLVSTLLLFLVISHSCRAWHWLQLKPGQPMYWHWLQLKPGQPMY

SEQ ID NO: 5715 - protein, 62 aa, synthetic construct
  REGION 1..62: note = Synthetic Construct
MGFVLFSQLPSFLLVSTLLLFLVISHSCRAQWHWLQLKPGQPMYGGGGSWHWLQLKPGQPMY

SEQ ID NO: 5716 - protein, 61 aa, synthetic construct
  REGION 1..61: note = Synthetic Construct
MGFVLFSQLPSFLLVSTLLLFLVISHSCRAWHWLQLKPGQPMYGGGGSWHWLQLKPGQPMY

SEQ ID NO: 5717 - protein, 60 aa, synthetic construct
  REGION 1..60: note = Synthetic Construct
MGFVLFSQLPSFLLVSTLLLFLVISHSCRAQNSQQDYLDWHWLQLKPGQPMYRRRRRRRR

SEQ ID NO: 5718 - protein, 58 aa, synthetic construct
  REGION 1..58: note = Synthetic Construct
MGFVLFSQLPSFLLVSTLLLFLVISHSCRAQNSQQDYWHWLQLKPGQPMYRRRRRRRR

SEQ ID NO: 5719 - protein, 57 aa, synthetic construct
  REGION 1..57: note = Synthetic Construct
MGFVLFSQLPSFLLVSTLLLFLVISHSCRAQNSQQDWHWLQLKPGQPMYRRRRRRRR

SEQ ID NO: 5720 - protein, 51 aa, synthetic construct
  REGION 1..51: note = Synthetic Construct
MGFVLFSQLPSFLLVSTLLLFLVISHSCRAWHWLQLKPGQPMYRRRRRRRR

SEQ ID NO: 5721 - protein, 41 aa, synthetic construct
  REGION 1..41: note = Synthetic Construct
MATTKHLALAILVLLSIGMTTSARTLLDWHWLQLKPGQPMY

SEQ ID NO: 5722 - protein, 38 aa, synthetic construct
  REGION 1..38: note = Synthetic Construct
MATTKHLALAILVLLSIGMTTSARTWHWLQLKPGQPMY

SEQ ID NO: 5723 - protein, 37 aa, synthetic construct
  REGION 1..37: note = Synthetic Construct
MATTKHLALAILVLLSIGMTTSARWHWLQLKPGQPMY

SEQ ID NO: 5724 - protein, 36 aa, synthetic construct
  REGION 1..36: note = Synthetic Construct
MATTKHLALAILVLLSIGMTTSAWHWLQLKPGQPMY

SEQ ID NO: 5725 - protein, 50 aa, synthetic construct
  REGION 1..50: note = Synthetic Construct
MATTKHLALAILVLLSIGMTTSARWHWLQLKPGQPMYWHWLQLKPGQPMY

SEQ ID NO: 5726 - protein, 49 aa, synthetic construct
  REGION 1..49: note = Synthetic Construct
MATTKHLALAILVLLSIGMTTSAWHWLQLKPGQPMYWHWLQLKPGQPMY

SEQ ID NO: 5727 - protein, 55 aa, synthetic construct
  REGION 1..55: note = Synthetic Construct
MATTKHLALAILVLLSIGMTTSARWHWLQLKPGQPMYGGGGSWHWLQLKPGQPMY

SEQ ID NO: 5728 - protein, 54 aa, synthetic construct
  REGION 1..54: note = Synthetic Construct
MATTKHLALAILVLLSIGMTTSAWHWLQLKPGQPMYGGGGSWHWLQLKPGQPMY

SEQ ID NO: 5729 - protein, 46 aa, synthetic construct
  REGION 1..46: note = Synthetic Construct
MATTKHLALAILVLLSIGMTTSARTWHWLQLKPGQPMYRRRRRRRR

SEQ ID NO: 5730 - protein, 45 aa, synthetic construct
  REGION 1..45: note = Synthetic Construct
MATTKHLALAILVLLSIGMTTSARWHWLQLKPGQPMYRRRRRRRR

SEQ ID NO: 5731 - protein, 44 aa, synthetic construct
  REGION 1..44: note = Synthetic Construct
MATTKHLALAILVLLSIGMTTSAWHWLQLKPGQPMYRRRRRRRR

SEQ ID NO: 5732 - DNA, 1816 bp, synthetic construct
  source 1..1816: mol_type = other DNA
gcatggcgcgccgtcgagctgcaggtcaacggatcaggatattcttgtttaagatgttgaactctatggaggtttgtatgaactgatgatctaggaccggataagttcccttcttcatagcgaacttattcaaagaatgttttgtgtatcattcttgttacattgttattaatgaaaaaatattattggtcattggactgaacacgagtgttaaatatggaccaggccccaaataagatccattgatatatgaattaaataacaagaataaatcgagtcaccaaaccacttgccttttttaacgagacttgttcaccaacttgatacaaaagtcattatcctatgcaaatcaataatcatacaaaaatatccaataacactaaaaaattaaaagaaatggataatttcacaatatgttatacgataaagaagttacttttccaagaaattcactgattttataagcccacttgcattagataaatggcaaaaaaaaacaaaaaggaaaagaaataaagcacgaagaattctagaaaatacgaaatacgcttcaatgcagtgggacccacggttcaattattgccaattttcagctccaccgtatatttaaaaaataaaacgataatgctaaaaaaatataaatcgtaacgatcgttaaatctcaacggctggatcttatgacgaccgttagaaattgtggttgtcgacgagtcagtaataaacggcgtcaaagtggttgcagccggcacacacgagtcgtgtttatcaactcaaagcacaaatacttttcctcaacctaaaaataaggcaattagccaaaaacaactttgcgtgtaaacaacgctcaatacacgtgtcattttattattagctattgcttcaccgccttagctttctcgtgacctagtcgtcctcgtcttttcttcttcttcttctataaaacaatacccaaagagctcttcttcttcacaattcagatttcaatttctcaaaatcttaaaaactttctctcaattctctctaccgtgatcaaggtaaatttctgtgttccttattctctcaaaatcttcgattttgttttcgttcgatcccaatttcgtatatgttctttggtttagattctgttaatcttagatcgaacacgattttctgggtttgatcgttagatatcatcttaattctcgattagggtttcatagatatcatccgatttgttcaaataatttgagttttgtcgaataattactcttcgatttgtgatttctatctagatctggtgttagtttctagtttgtgcgatcgaatttgtcgattaatctgagtttttctgattaacaggcctgcaggtagatcgctcgtcgacatggcaaccactaagcaccttgccctcgccatcctggtgctcctttccattggaatgacgacctctgcttggcactggttacaattgaagcctggacagccaatgtatggaggtggaggctcctggcattggctgcaattaaagcccggacaaccaatgtactaaattggtgaccagctcgaatttccccgatcgttcaaacatttggcaataaagtttcttaagattgaatcctgttgccggtcttgcgatgattatcatataatttctgttgaattacgttaagcatgtaataattaacatgtaatgcatgacgttatttatgagatgggtttttatgattagagtcccgcaattatacatttaatacgcgatagaaaacaaaatatagcgcgcaaactaggataaattatcgcgcgcggtgtcatctatgttactagatcccatggatgc

SEQ ID NO: 5733 - DNA, 2548 bp, synthetic construct
  source 1..2548: mol_type = other DNA
gcatggcgcgccgtcgagctgcaggtcaacggatcaggatattcttgtttaagatgttgaactctatggaggtttgtatgaactgatgatctaggaccggataagttcccttcttcatagcgaacttattcaaagaatgttttgtgtatcattcttgttacattgttattaatgaaaaaatattattggtcattggactgaacacgagtgttaaatatggaccaggccccaaataagatccattgatatatgaattaaataacaagaataaatcgagtcaccaaaccacttgccttttttaacgagacttgttcaccaacttgatacaaaagtcattatcctatgcaaatcaataatcatacaaaaatatccaataacactaaaaaattaaaagaaatggataatttcacaatatgttatacgataaagaagttacttttccaagaaattcactgattttataagcccacttgcattagataaatggcaaaaaaaaacaaaaaggaaaagaaataaagcacgaagaattctagaaaatacgaaatacgcttcaatgcagtgggacccacggttcaattattgccaattttcagctccaccgtatatttaaaaaataaaacgataatgctaaaaaaatataaatcgtaacgatcgttaaatctcaacggctggatcttatgacgaccgttagaaattgtggttgtcgacgagtcagtaataaacggcgtcaaagtggttgcagccggcacacacgagtcgtgtttatcaactcaaagcacaaatacttttcctcaacctaaaaataaggcaattagccaaaaacaactttgcgtgtaaacaacgctcaatacacgtgtcattttattattagctattgcttcaccgccttagctttctcgtgacctagtcgtcctcgtcttttcttcttcttcttctataaaacaatacccaaagagctcttcttcttcacaattcagatttcaatttctcaaaatcttaaaaactttctctcaattctctctaccgtgatcaaggtaaatttctgtgttccttattctctcaaaatcttcgattttgttttcgttcgatcccaatttcgtatatgttctttggtttagattctgttaatcttagatcgaacacgattttctgggtttgatcgttagatatcatcttaattctcgattagggtttcatagatatcatccgatttgttcaaataatttgagttttgtcgaataattactcttcgatttgtgatttctatctagatctggtgttagtttctagtttgtgcgatcgaatttgtcgattaatctgagtttttctgattaacaggcctgcaggtagatcgctcgtcgacatggcaaccactaagcaccttgccctcgccatcctggtgctcctttccattggaatgacgacctctgcttggcactggttacaattgaagcctggacagccaatgtatggaggtggaggctcctggcattggctgcaattaaagcccggacaaccaatgtacgactacaaggacgatgatgataaaatggtctccaaaggggaggaggataatatggcaatcatcaaagaatttatgcgttttaaagttcacatggaggggtcagtgaacggtcatgagtttgaaatcgagggggagggagaaggaagaccctatgagggaacccagacggcaaagcttaaagtaaccaaaggaggcccgctgccctttgcttgggatatattatcacctcaatttatgtatggaagcaaagcatatgttaagcatccagcagacattcctgattatctcaaactttctttccccgaaggtttcaagtgggaacgagtgatgaactttgaagacggtggggtcgtgactgtgacacaggattcctcattgcaagacggagagtttatttataaggtcaaactgagaggaactaattttccgtcagacggcccggtgatgcaaaagaagacgatgggttgggaagcaagtagcgagaggatgtaccccgaagatggtgctttgaagggagagataaagcaacgtcttaaattaaaagacgggggtcattacgatgcagaggtcaaaacaacctataaggcaaaaaagcccgtccaactcccaggcgcttacaacgtaaatattaagcttgacataacatctcacaacgaagactacacgattgtggaacagtacgagcgtgccgaaggcaggcattctacgggaggtatggacgaattatacaaataaattggtgaccagctcgaatttccccgatcgttcaaacatttggcaataaagtttcttaagattgaatcctgttgccggtcttgcgatgattatcatataatttctgttgaattacgttaagcatgtaataattaacatgtaatgcatgacgttatttatgagatgggtttttatgattagagtcccgcaattatacatttaatacgcgatagaaaacaaaatatagcgcgcaaactaggataaattatcgcgcgcggtgtcatctatgttactagatcccatggatgc

SEQ ID NO: 5734 - DNA, 2554 bp, synthetic construct
  source 1..2554: mol_type = other DNA
gcatggcgcgccgtcgagctgcaggtcaacggatcaggatattcttgtttaagatgttgaactctatggaggtttgtatgaactgatgatctaggaccggataagttcccttcttcatagcgaacttattcaaagaatgttttgtgtatcattcttgttacattgttattaatgaaaaaatattattggtcattggactgaacacgagtgttaaatatggaccaggccccaaataagatccattgatatatgaattaaataacaagaataaatcgagtcaccaaaccacttgccttttttaacgagacttgttcaccaacttgatacaaaagtcattatcctatgcaaatcaataatcatacaaaaatatccaataacactaaaaaattaaaagaaatggataatttcacaatatgttatacgataaagaagttacttttccaagaaattcactgattttataagcccacttgcattagataaatggcaaaaaaaaacaaaaaggaaaagaaataaagcacgaagaattctagaaaatacgaaatacgcttcaatgcagtgggacccacggttcaattattgccaattttcagctccaccgtatatttaaaaaataaaacgataatgctaaaaaaatataaatcgtaacgatcgttaaatctcaacggctggatcttatgacgaccgttagaaattgtggttgtcgacgagtcagtaataaacggcgtcaaagtggttgcagccggcacacacgagtcgtgtttatcaactcaaagcacaaatacttttcctcaacctaaaaataaggcaattagccaaaaacaactttgcgtgtaaacaacgctcaatacacgtgtcattttattattagctattgcttcaccgccttagctttctcgtgacctagtcgtcctcgtcttttcttcttcttcttctataaaacaatacccaaagagctcttcttcttcacaattcagatttcaatttctcaaaatcttaaaaactttctctcaattctctctaccgtgatcaaggtaaatttctgtgttccttattctctcaaaatcttcgattttgttttcgttcgatcccaatttcgtatatgttctttggtttagattctgttaatcttagatcgaacacgattttctgggtttgatcgttagatatcatcttaattctcgattagggtttcatagatatcatccgatttgttcaaataatttgagttttgtcgaataattactcttcgatttgtgatttctatctagatctggtgttagtttctagtttgtgcgatcgaatttgtcgattaatctgagtttttctgattaacaggcctgcaggtagatcgctcgtcgacatgcctaaaaaaaaaagaaaggtagaagacccctactgctggcactggttacagttaaaaccaggacagccgatgtacggaggaggaggttcttggcactggttgcagctcaagcccggccagccgatgtatgactacaaggacgatgatgataaaatggtctccaaaggggaggaggataatatggcaatcatcaaagaatttatgcgttttaaagttcacatggaggggtcagtgaacggtcatgagtttgaaatcgagggggagggagaaggaagaccctatgagggaacccagacggcaaagcttaaagtaaccaaaggaggcccgctgccctttgcttgggatatattatcacctcaatttatgtatggaagcaaagcatatgttaagcatccagcagacattcctgattatctcaaactttctttccccgaaggtttcaagtgggaacgagtgatgaactttgaagacggtggggtcgtgactgtgacacaggattcctcattgcaagacggagagtttatttataaggtcaaactgagaggaactaattttccgtcagacggcccggtgatgcaaaagaagacgatgggttgggaagcaagtagcgagaggatgtaccccgaagatggtgctttgaagggagagataaagcaacgtcttaaattaaaagacgggggtcattacgatgcagaggtcaaaacaacctataaggcaaaaaagcccgtccaactcccaggcgcttacaacgtaaatattaagcttgacataacatctcacaacgaagactacacgattgtggaacagtacgagcgtgccgaaggcaggcattctacgggaggtatggacgaattatacaaacctaaaaaaaaaagaaaggtagaagacccctactgctaaattggtgaccagctcgaatttccccgatcgttcaaacatttggcaataaagtttcttaagattgaatcctgttgccggtcttgcgatgattatcatataatttctgttgaattacgttaagcatgtaataattaacatgtaatgcatgacgttatttatgagatgggtttttatgattagagtcccgcaattatacatttaatacgcgatagaaaacaaaatatagcgcgcaaactaggataaattatcgcgcgcggtgtcatctatgttactagatcccatggatgc

SEQ ID NO: 5735 - DNA, 2581 bp, synthetic construct
  source 1..2581: mol_type = other DNA
gcatggcgcgccgtcgagctgcaggtcaacggatcaggatattcttgtttaagatgttgaactctatggaggtttgtatgaactgatgatctaggaccggataagttcccttcttcatagcgaacttattcaaagaatgttttgtgtatcattcttgttacattgttattaatgaaaaaatattattggtcattggactgaacacgagtgttaaatatggaccaggccccaaataagatccattgatatatgaattaaataacaagaataaatcgagtcaccaaaccacttgccttttttaacgagacttgttcaccaacttgatacaaaagtcattatcctatgcaaatcaataatcatacaaaaatatccaataacactaaaaaattaaaagaaatggataatttcacaatatgttatacgataaagaagttacttttccaagaaattcactgattttataagcccacttgcattagataaatggcaaaaaaaaacaaaaaggaaaagaaataaagcacgaagaattctagaaaatacgaaatacgcttcaatgcagtgggacccacggttcaattattgccaattttcagctccaccgtatatttaaaaaataaaacgataatgctaaaaaaatataaatcgtaacgatcgttaaatctcaacggctggatcttatgacgaccgttagaaattgtggttgtcgacgagtcagtaataaacggcgtcaaagtggttgcagccggcacacacgagtcgtgtttatcaactcaaagcacaaatacttttcctcaacctaaaaataaggcaattagccaaaaacaactttgcgtgtaaacaacgctcaatacacgtgtcattttattattagctattgcttcaccgccttagctttctcgtgacctagtcgtcctcgtcttttcttcttcttcttctataaaacaatacccaaagagctcttcttcttcacaattcagatttcaatttctcaaaatcttaaaaactttctctcaattctctctaccgtgatcaaggtaaatttctgtgttccttattctctcaaaatcttcgattttgttttcgttcgatcccaatttcgtatatgttctttggtttagattctgttaatcttagatcgaacacgattttctgggtttgatcgttagatatcatcttaattctcgattagggtttcatagatatcatccgatttgttcaaataatttgagttttgtcgaataattactcttcgatttgtgatttctatctagatctggtgttagtttctagtttgtgcgatcgaatttgtcgattaatctgagtttttctgattaacaggcctgcaggtagatcgctcgtcgacatgcctaaaaaaaaaagaaaggtagaagacccctactgcgactacaaggacgatgatgataaagtctccaaaggggaggaggataatatggcaatcatcaaagaatttatgcgttttaaagttcacatggaggggtcagtgaacggtcatgagtttgaaatcgagggggagggagaaggaagaccctatgagggaacccagacggcaaagcttaaagtaaccaaaggaggcccgctgccctttgcttgggatatattatcacctcaatttatgtatggaagcaaagcatatgttaagcatccagcagacattcctgattatctcaaactttctttccccgaaggtttcaagtgggaacgagtgatgaactttgaagacggtggggtcgtgactgtgacacaggattcctcattgcaagacggagagtttatttataaggtcaaactgagaggaactaattttccgtcagacggcccggtgatgcaaaagaagacgatgggttgggaagcaagtagcgagaggatgtaccccgaagatggtgctttgaagggagagataaagcaacgtcttaaattaaaagacgggggtcattacgatgcagaggtcaaaacaacctataaggcaaaaaagcccgtccaactcccaggcgcttacaacgtaaatattaagcttgacataacatctcacaacgaagactacacgattgtggaacagtacgagcgtgccgaaggcaggcattctacgggaggtatggacgaattatacaaagggtctggcgcaaccaacttctcactcttaaagcaggctggtgatgtcgaggaaaatccaggcccgtggcactggttacagttaaaaccaggacagccgatgtacggaggaggaggttcttggcactggttgcagctcaagcccggccagccgatgtattaaattggtgaccagctcgaatttccccgatcgttcaaacatttggcaataaagtttcttaagattgaatcctgttgccggtcttgcgatgattatcatataatttctgttgaattacgttaagcatgtaataattaacatgtaatgcatgacgttatttatgagatgggtttttatgattagagtcccgcaattatacatttaatacgcgatagaaaacaaaatatagcgcgcaaactaggataaattatcgcgcgcggtgtcatctatgttactagatcccatggatgc

SEQ ID NO: 5736 - protein, 9 aa, synthetic construct
RKKRRQRRR

SEQ ID NO: 5737 - protein, 11 aa, synthetic construct
KKLFKKILKYL

SEQ ID NO: 5738 - protein, 9 aa, synthetic construct
  SITE 1..9: note = D-arginine
RRRRRRRRR

SEQ ID NO: 5739 - protein, 18 aa, synthetic construct
KALKKLLAKWLAAAKALL

SEQ ID NO: 5740 - protein, 14 aa, synthetic construct
LLLFLLKKRKKRKY

SEQ ID NO: 5741 - protein, 23 aa, synthetic construct
SYFILRRRRKRFPYFFTDVRVAA

SEQ ID NO: 5742 - protein, 13 aa, synthetic construct
KMDCRWRWKCCKK

SEQ ID NO: 5743 - protein, 10 aa, synthetic construct
CRWRWKCCKK

SEQ ID NO: 5744 - protein, 15 aa, synthetic construct
FLGKKFKKYFLQLLK

SEQ ID NO: 5745 - protein, 16 aa, synthetic construct
KTVLLRKLLKLLVRKI

SEQ ID NO: 5746 - protein, 23 aa, synthetic construct
GIGKFLHSAKKWGKAFVGQIMNC
